(19) United States
(12) Patent Application Publication
(10) Pub. No.: US 2023/0303985 A1
(43) Pub. Date: Sep. 28, 2023

(54) FUSION PROTEINS AND METHODS THEREOF

(71) Applicant: The Trustees of Columbia University in the City of New York, New York, NY (US)

(72) Inventors: Antonio IAVARONE, New York, NY (US); Anna LASORELLA, New York, NY (US); Raul RABADAN, New York, NY (US)

(21) Appl. No.: 18/046,131

(22) Filed: Oct. 12, 2022

Related U.S. Application Data
(62) Division of application No. 16/246,167, filed on Jan. 11, 2019, now Pat. No. 11,505,788.
Application No. 16/246,167 is a division of application No. 14/853,568, filed on Sep. 14, 2015, now Pat. No. 10,208,296.
Application No. 14/853,568 is a continuation of application No. PCT/US2014/026351, filed on Mar. 13, 2014.
(60) Provisional application No. 61/793,086, filed on Mar. 15, 2013.

(51) Int. Cl. C12N 9/12; C07K 14/71; C07K 14/47; C12N 9/16; A61K 38/17; A61K 31/404; A61K 31/4439; A61K 31/47; A61K 31/496; A61K 31/506; A61K 31/519; A61K 31/53; G01N 33/574; A61K 31/517; C07K 14/435; C07K 16/40; C12Q 1/6886; G01N 33/573

(52) U.S. Cl. CPC C12N 9/12; C07K 14/71; C07K 14/47; C12N 9/16; C12Y 301/03003; A61K 38/179; A61K 31/404; A61K 31/4439; A61K 31/47; A61K 31/496; A61K 31/506; A61K 31/519; A61K 31/53; G01N 33/57484; A61K 31/517; C07K 14/435; C07K 14/4738; C07K 16/40; C12Q 1/6886; G01N 33/573; C07K 2319/00; G01N 2333/71; C07K 2317/76; C12Y 207/10001

(57) ABSTRACT

The invention discloses oncogenic fusion proteins. The invention provides methods for treating gene-fusion based cancers.

[0001] This application is a divisional of U.S. patent application Ser. No. 16/246,167 filed on Jan. 11, 2019, which is a divisional of U.S. patent application Ser. No. 14/853,568 filed on Sep. 14, 2015, later issued as U.S. Pat. No. 10,208,296 on Feb. 19, 2019, which is a continuation of PCT International Application No. PCT/US2014/026351 filed on Mar. 13, 2014, which claims the benefit of and priority to U.S. Provisional Patent Application No. 61/793,086, filed on Mar. 15, 2013, the content of each of which are hereby incorporated by reference in their entireties.

[0002] All patents, patent applications and publications cited herein are hereby incorporated by reference in their entirety. The disclosures of these publications in their entireties are hereby incorporated by reference into this application.

### GOVERNMENT SUPPORT

[0003] This invention was made with government support under grant CA101644 awarded by the National Institutes of Health. The Government has certain rights in the invention.

[0004] This patent disclosure contains material that is subject to copyright protection. The copyright owner has no objection to the facsimile reproduction by anyone of the patent document or the patent disclosure as it appears in the U.S. Patent and Trademark Office patent file or records, but otherwise reserves any and all copyright rights.

### SEQUENCE LISTING

[0005] The instant application contains a Sequence Listing which has been submitted electronically in XML file format and is hereby incorporated by reference in its entirety. Said XML copy, created on May 23, 2023, is named 0019240_01034US4_SL.xml and is 2,301,248 bytes in size.

### BACKGROUND OF THE INVENTION

[0006] Glioblastoma multiforme (GBM) is the most common form of brain cancer and among the most incurable and lethal of all human cancers. The current standard of care includes surgery, chemotherapy, and radiation therapy. However, the prognosis of GBM remains uniformly poor. There are few available targeted therapies and none that specifically target GBM.

[0007] The target population of GBM patients who may carry EGFR gene fusions and would benefit from targeted inhibition of EGFR kinase activity is estimated to correspond to 6,000 patients per year world-wide.

### SUMMARY OF THE INVENTION

[0008] The invention is based, at least in part, on the discovery of a highly expressed class of gene fusions in GBM, which join the receptor tyrosine kinase (RTK) domain of EGFR genes to the coiled-coil domain of septin proteins, such as Septin-14, or fused to a polypeptide comprising a phosphoserine phosphatase (PSPH) protein or a polypeptide comprising a Cullin-associated and neddylation-dissociated (CAND) protein. The invention is based, at least in part, on the finding that EGFR-SEPT fusions, EGFR-PSPH fusions, and EGFR-CAND fusions identify a subset of GBM patients who will benefit from targeted inhibition of the tyrosine kinase activity of EGFR. Identification of fusions of EGFR genes in glioblastoma patients are useful therapeutic targets.

[0009] An aspect of the invention is directed to a purified fusion protein comprising a tyrosine kinase domain of an EGFR protein fused to a polypeptide that constitutively activates the tyrosine kinase domain of the EGFR protein. In one embodiment, the purified fusion protein is essentially free of other human proteins.

[0010] An aspect of the invention is directed to a purified fusion protein comprising the tyrosine kinase domain of an EGFR protein fused 5′ to a polypeptide comprising the coiled-coil domain of a Septin protein. In one embodiment, the Septin protein is Septin-1, Septin-2, Septin-3, Septin-4, Septin-5, Septin-6, Septin-7, Septin-8, Septin-9, Septin-10, Septin-11, Septin-12, Septin-13, or Septin-14. In another embodiment, the Septin protein is Septin-14 (SEPT14). In another embodiment, the purified fusion protein is essentially free of other human proteins.

[0011] An aspect of the invention is directed to a purified fusion protein comprising the tyrosine kinase domain of an EGFR protein fused 5′ to a polypeptide comprising a phosphoserine phosphatase (PSPH) protein. In another embodiment, the purified fusion protein is essentially free of other human proteins.

[0012] An aspect of the invention is directed to a purified fusion protein comprising the tyrosine kinase domain of an EGFR protein fused 3′ to a polypeptide comprising a Cullin-associated and neddylation-dissociated (CAND) protein. In one embodiment, the CAND protein is CAND1, CAND2, or CAND3. In another embodiment, the purified fusion protein is essentially free of other human proteins.

[0013] An aspect of the invention is directed to a purified fusion protein encoded by an EGFR-SEPT14 nucleic acid, wherein EGFR-SEPT14 comprises a combination of exons 1-25 of EGFR located on human chromosome 7p11.2 spliced 5′ to a combination of exons 7-10 of SEPT14 located on human chromosome 7, wherein a genomic breakpoint occurs in any one of exons 1-25 of EGFR and any one of exons 7-10 of SEPT14. In another embodiment, the purified fusion protein is essentially free of other human proteins.

[0014] An aspect of the invention is directed to a purified fusion protein encoded by an EGFR-PSPH nucleic acid, wherein EGFR-PSPH comprises a combination of exons 1-25 of EGFR located on human chromosome 7p12 spliced 5′ to a combination of exons 1-10 of PSPH located on human chromosome 7p11.2, wherein a genomic breakpoint occurs in any one of exons 1-25 of EGFR and any one of exons 1-10 of PSPH. In another embodiment, the purified fusion protein is essentially free of other human proteins.

[0015] An aspect of the invention is directed to a purified fusion protein encoded by an EGFR-CAND1 nucleic acid, wherein EGFR-CAND1 comprises a combination of exons 1-25 of EGFR located on human chromosome 7p12 spliced 3′ to a combination of exons 1-16 of CAND1 located on human chromosome 12q14, wherein a genomic breakpoint occurs in any one of exons 1-25 of EGFR and any one of exons 1-16 of CAND1. In another embodiment, the purified fusion protein is essentially free of other human proteins.

[0016] An aspect of the invention is directed to a synthetic nucleic acid encoding the EGFR fusion proteins described above.

[0017] An aspect of the invention is directed to a purified EGFR-SEPT14 fusion protein comprising SEQ ID NO: 1 or 5. In one embodiment, the purified fusion protein is essentially free of other human proteins.

[0018] An aspect of the invention is directed to a purified EGFR-SEPT14 fusion protein having a genomic breakpoint comprising SEQ ID NO: 4. In another embodiment, the purified fusion protein is essentially free of other human proteins.

[0019] An aspect of the invention is directed to a purified EGFR-PSPH fusion protein comprising SEQ ID NO: 7 or 11. In another embodiment, the purified fusion protein is essentially free of other human proteins.

[0020] An aspect of the invention is directed to a purified EGFR-PSPH fusion protein having a genomic breakpoint comprising SEQ ID NO: 10. In one embodiment, the purified fusion protein is essentially free of other human proteins.

[0021] An aspect of the invention is directed to a purified EGFR-CAND1 fusion protein comprising SEQ ID NO: 13 or 8495. In one embodiment, the purified fusion protein is essentially free of other human proteins.

[0022] An aspect of the invention is directed to a purified EGFR-CAND1 fusion protein having a genomic breakpoint comprising SEQ ID NO: 15. In one embodiment, the purified fusion protein is essentially free of other human proteins.

[0023] An aspect of the invention is directed to a synthetic nucleic acid encoding an EGFR-SEPT14 fusion protein comprising SEQ ID NO: 2.

[0024] An aspect of the invention is directed to a synthetic nucleic acid encoding an EGFR-SEPT14 fusion protein having a genomic breakpoint comprising SEQ ID NO: 4.

[0025] An aspect of the invention is directed to a synthetic nucleic acid encoding an EGFR-PSPH fusion protein comprising SEQ ID NO: 8.

[0026] An aspect of the invention is directed to a synthetic nucleic acid encoding an EGFR-PSPH fusion protein having a genomic breakpoint comprising SEQ ID NO: 10.

[0027] An aspect of the invention is directed to a synthetic nucleic acid encoding an EGFR-CAND1 fusion protein comprising SEQ ID NO: 14.

[0028] An aspect of the invention is directed to a synthetic nucleic acid encoding an EGFR-CAND1 fusion protein having a genomic breakpoint comprising SEQ ID NO: 15.

[0029] An aspect of the invention is directed to an antibody or antigen-binding fragment thereof that specifically binds to a purified fusion protein comprising a tyrosine kinase domain of an EGFR protein fused to a polypeptide that constitutively activates the tyrosine kinase domain of the EGFR protein. In one embodiment, the fusion protein is an EGFR-SEPT fusion protein, an EGFR-PSPH fusion protein, or an EGFR-CAND fusion protein. In another embodiment, the EGFR-SEPT fusion protein is EGFR-SEPT14. In one embodiment, the EGFR-SEPT fusion protein comprises the amino acid sequence of SEQ ID NO: 1, 3, or 5. In one embodiment, the EGFR-CAND fusion protein is EGFR-CAND1. In one embodiment, the EGFR-CAND fusion protein comprises the amino acid sequence of SEQ ID NO: 13, 16, or 8495.

[0030] An aspect of the invention is directed to an antibody or antigen-binding fragment thereof that specifically binds to a purified fusion protein comprising a tyrosine kinase domain of an EGFR protein fused to a polypeptide comprising the coiled-coil domain of a Septin protein. In another embodiment, the EGFR-SEPT fusion protein is EGFR-SEPT14. In one embodiment, the EGFR-SEPT fusion protein comprises the amino acid sequence of SEQ ID NO: 1, 3, or 5.

[0031] An aspect of the invention is directed to an antibody or antigen-binding fragment thereof that specifically binds to a purified fusion protein comprising a tyrosine kinase domain of an EGFR protein fused to a polypeptide comprising a phosphoserine phosphatase (PSPH) protein. In one embodiment, the EGFR-PSPH fusion protein comprises the amino acid sequence of SEQ ID NO: 7, 9, or 11.

[0032] An aspect of the invention is directed to an antibody or antigen-binding fragment thereof, that specifically binds to a purified fusion protein comprising a tyrosine kinase domain of an EGFR protein fused to a polypeptide comprising a Cullin-associated and neddylation-dissociated (CAND) protein. In one embodiment, the EGFR-CAND fusion protein is EGFR-CAND1. In one embodiment, the EGFR-CAND fusion protein comprises the amino acid sequence of SEQ ID NO: 13, 16, or 8495.

[0033] An aspect of the invention is directed to a composition for decreasing the expression level or activity of a fusion protein in a subject comprising the tyrosine kinase domain of an EGFR protein fused to a polypeptide that constitutively activates the tyrosine kinase domain of the EGFR protein, the composition in an admixture of a pharmaceutically acceptable carrier comprising an inhibitor of the fusion protein. In one embodiment, the inhibitor comprises an antibody that specifically binds to an EGFR-SEPT fusion protein, an EGFR-PSPH fusion protein, an EGFR-CAND fusion protein, or a fragment thereof; a small molecule that specifically binds to an EGFR protein; an antisense RNA or antisense DNA that decreases expression of an EGFR-SEPT fusion protein, an EGFR-PSPH fusion protein, an EGFR-CAND fusion; a siRNA that specifically targets an EGFR-SEPT fusion gene, an EGFR-PSPH fusion gene, or an EGFR-CAND; or a combination thereof. In another embodiment, the CAND protein is CAND1. In a further embodiment, the SEPT protein is SEPT14. In some embodiments, the small molecule that specifically binds to an EGFR protein comprises AZD4547, NVP-BGJ398, PD173074, NF449, TK1258, BIBF-1120, BMS-582664, AZD-2171, TSU68, AB1010, AP24534, E-7080, LY2874455, or a combination thereof.

[0034] An aspect of the invention is directed to a method for treating a gene-fusion associated cancer in a subject in need thereof, the method comprising administering to the subject an effective amount of an EGFR fusion molecule inhibitor. In one embodiment, the gene-fusion associated cancer comprises glioblastoma multiforme, breast cancer, lung cancer, prostate cancer, or colorectal carcinoma. In one embodiment, the EGFR fusion comprises an EGFR protein fused to a polypeptide that constitutively activates the tyrosine kinase domain of the EGFR protein. In one embodiment, the EGFR fusion protein is an EGFR-SEPT14 fusion protein, an EGFR-PSPH fusion protein, or an EGFR-CAND1 fusion protein. In one embodiment, the inhibitor comprises an antibody that specifically binds to an EGFR-SEPT fusion protein, an EGFR-PSPH fusion protein, an EGFR-CAND fusion protein, or a fragment thereof; a small molecule that specifically binds to an EGFR protein; an antisense RNA or antisense DNA that decreases expression of an EGFR-SEPT fusion protein, an EGFR-PSPH fusion protein, an EGFR-CAND fusion; a siRNA that specifically targets an EGFR-SEPT fusion gene, an EGFR-PSPH fusion gene, or an EGFR-CAND; or a combination thereof. In one embodiment, the small molecule that specifically binds to an EGFR protein comprises AZD4547, NVP-BGJ398, PD173074, NF449, TK1258, BIBF-1120, BMS-582664, AZD-2171, TSU68, AB1010, AP24534, E-7080, LY2874455, or a combination thereof.

[0035] An aspect of the invention is directed to a method of decreasing growth of a solid tumor in a subject in need thereof, the method comprising administering to the subject an effective amount of an EGFR fusion molecule inhibitor, wherein the inhibitor decreases the size of the solid tumor. In one embodiment, the subject is afflicted with a gene-fusion associated cancer. In one embodiment, the gene-fusion associated cancer comprises glioblastoma multiforme, breast cancer, lung cancer, prostate cancer, or colorectal carcinoma. In one embodiment, the solid tumor comprises glioblastoma multiforme, breast cancer, lung cancer, prostate cancer, or colorectal carcinoma. In one embodiment, the EGFR fusion comprises an EGFR protein fused to a polypeptide that constitutively activates the tyrosine kinase domain of the EGFR protein. In one embodiment, the EGFR fusion protein is an EGFR-SEPT14 fusion protein, an EGFR-PSPH fusion protein, or an EGFR-CAND1 fusion protein. In one embodiment, the inhibitor comprises an antibody that specifically binds to an EGFR-SEPT fusion protein, an EGFR-PSPH fusion protein, an EGFR-CAND fusion protein, or a fragment thereof; a small molecule that specifically binds to an EGFR protein; an antisense RNA or antisense DNA that decreases expression of an EGFR-SEPT fusion protein, an EGFR-PSPH fusion protein, an EGFR-CAND fusion; a siRNA that specifically targets an EGFR-SEPT fusion gene, an EGFR-PSPH fusion gene, or an EGFR-CAND; or a combination thereof. In one embodiment, the small molecule that specifically binds to an EGFR protein comprises AZD4547, NVP-BGJ398, PD173074, NF449, TK1258, BIBF-1120, BMS-582664, AZD-2171, TSU68, AB1010, AP24534, E-7080, LY2874455, or a combination thereof.

[0036] An aspect of the invention is directed to a method of reducing cell proliferation in a subject afflicted with a gene-fusion associated cancer, the method comprising administering to the subject an effective amount of an EGFR fusion molecule inhibitor, wherein the inhibitor decreases cell proliferation. In one embodiment, the gene-fusion associated cancer comprises glioblastoma multiforme, breast cancer, lung cancer, prostate cancer, or colorectal carcinoma. In one embodiment, the EGFR fusion comprises an EGFR protein fused to a polypeptide that constitutively activates the tyrosine kinase domain of the EGFR protein. In one embodiment, the EGFR fusion protein is an EGFR-SEPT14 fusion protein, an EGFR-PSPH fusion protein, or an EGFR-CAND1 fusion protein. In one embodiment, the inhibitor comprises an antibody that specifically binds to an EGFR-SEPT fusion protein, an EGFR-PSPH fusion protein, an EGFR-CAND fusion protein, or a fragment thereof; a small molecule that specifically binds to an EGFR protein; an antisense RNA or antisense DNA that decreases expression of an EGFR-SEPT fusion protein, an EGFR-PSPH fusion protein, an EGFR-CAND fusion; a siRNA that specifically targets an EGFR-SEPT fusion gene, an EGFR-PSPH fusion gene, or an EGFR-CAND; or a combination thereof. In one embodiment, the small molecule that specifically binds to an EGFR protein comprises AZD4547, NVP-BGJ398, PD173074, NF449, TK1258, BIBF-1120, BMS-582664, AZD-2171, TSU68, AB1010, AP24534, E-7080, LY2874455, or a combination thereof.

[0037] An aspect of the invention is directed to a diagnostic kit for determining whether a sample from a subject exhibits a presence of an EGFR fusion, the kit comprising at least one oligonucleotide that specifically hybridizes to an EGFR fusion, or a portion thereof. In one embodiment, the oligonucleotides comprise a set of nucleic acid primers or in situ hybridization probes. In another embodiment, the oligonucleotide comprises SEQ ID NOS 32, 33, 34, 35, 36, 37, 38, 39, 40, 41, 42, 43, 44, 45, 87, 88, 89, or a combination thereof. In a further embodiment, the primers prime a polymerase reaction only when an EGFR fusion is present. In some embodiments, the fusion protein is an EGFR-SEPT14 fusion protein, an EGFR-PSPH fusion protein, or an EGFR-CAND1 fusion protein. In other embodiments, the determining comprises gene sequencing, selective hybridization, selective amplification, gene expression analysis, or a combination thereof.

[0038] An aspect of the invention is directed to a diagnostic kit for determining whether a sample from a subject exhibits a presence of an EGFR fusion protein, the kit comprising an antibody that specifically binds to an EGFR fusion protein comprising SEQ ID NO: 1, 3, 5, 7, 9, 11, 13, 16, or 8495, wherein the antibody will recognize the protein only when an EGFR fusion protein is present. In one embodiment, the fusion protein is an EGFR-SEPT14 fusion protein, an EGFR-PSPH fusion protein, or an EGFR-CAND1 fusion protein. In one embodiment, the subject is afflicted with a gene-fusion associated cancer. In one embodiment, the gene-fusion associated cancer comprises glioblastoma multiforme, breast cancer, lung cancer, prostate cancer, or colorectal carcinoma.

[0039] An aspect of the invention is directed to a method for detecting the presence of an EGFR fusion in a human subject. The method comprises obtaining a biological sample from the human subject; and detecting whether or not there is an EGFR fusion present in the subject. In one embodiment, the detecting comprises measuring EGFR fusion protein levels by ELISA using an antibody directed to SEQ ID NO: 1, 3, 5, 7, 9, 11, 13, 16, or 8495; western blot using an antibody directed to SEQ ID NO: 1, 3, 5, 7, 9, 11, 13, 16, or 8495; mass spectroscopy, isoelectric focusing, or a combination thereof.

[0040] An aspect of the invention is directed to a method for detecting the presence of an EGFR fusion in a human subject. The method comprises obtaining a biological sample from a human subject; and detecting whether or not there is a nucleic acid sequence encoding an EGFR fusion protein in the subject. In one embodiment, the nucleic acid sequence comprises any one of SEQ ID NOS: 2, 4, 8, 10, 14, and 15. In another embodiment, the detecting comprises using hybridization, amplification, or sequencing techniques to detect an EGFR fusion. In a further embodiment, the amplification uses primers comprising SEQ ID NOS 32, 33, 34, 35, 36, 37, 38, 39, 40, 41, 42, 43, 44, 45, 87, 88, or 89. In some embodiments, the fusion protein is an EGFR-SEPT14 fusion protein, an EGFR-PSPH fusion protein, or an EGFR-CAND1 fusion protein.

### BRIEF DESCRIPTION OF THE FIGURES

[0041] To conform to the requirements for PCT patent applications, many of the figures presented herein are black and white representations of images originally created in color. In the below descriptions and the examples, the colored plots and images are described in terms of its appearance in black and white. The original color versions can be viewed in Frattini et al., (2013) Nature Genetics, 45(10):1141-49 (including the accompanying Supplementary Information available in the on-line version of the manuscript available on the Nature Genetics web site). For the purposes of the PCT, the contents of Frattini et al., (2013) Nature Genetics, 45(10):1141-49, including the accompanying “Supplementary Information,” are herein incorporated by reference.

[0042] FIG. 1A is a chromosome view of validated GBM genes scoring at the top of each of the three categories by MutComFocal. The plot shows mutated genes without significant copy number alterations (Mut, mutation %, frequency of mutations). Previously known GBM genes are indicated in green (light grey in black and white image), new and independently validated GBM genes are indicated in red (dark grey in black and white image).

[0043] FIG. 1B is a chromosome view of validated GBM genes scoring at the top of each of the three categories by MutComFocal. The plot shows mutated genes in regions of focal and recurrent amplifications (Amp-Mut, Amplification/mutation scores). Previously known GBM genes are indicated in green (light grey in black and white image), new and independently validated GBM genes are indicated in red (dark grey in black and white image).

[0044] FIG. 1C is a chromosome view of validated GBM genes scoring at the top of each of the three categories by MutComFocal. The plot shows mutated genes in regions of focal and recurrent deletions (Del-Mut, Deletion/mutation scores). Previously known GBM genes are indicated in green (light grey in black and white image), new and independently validated GBM genes are indicated in red (dark grey in black and white image).

[0045] FIGS. 2A-B shows Localization of altered residues in LZTR-1. FIG. 2A shows lysates from 293T cells transfected with vectors expressing LZTR-1 and the Flag-Cul3 wild type (WT), Flag-Cul3-dominant negative (DN) or the empty vector were immunoprecipitated with Flag antibody and assayed by western blot with the indicated antibodies. *, non specific band; left bracket indicates Cul3 polypeptides. The molecular weight is indicated on the right. FIG. 2B shows homology model of the Kelch (green; grey in black and white image of left hand side of ribbon diagram), BTB (cyan; (light grey in black and white image of center and right of ribbon diagram) and BACK (purple; dark grey in black and white image of center and right of ribbon diagram) domains of LZTR-1 with the Cul3 N-terminal domain (white) docked onto the putative binding site. GBM mutations are indicated in red (dark grey in black and white image; left hand side of ribbon diagram).

[0046] FIG. 2C. Sequence alignment of the six blades from the Kelch β-propeller domain. Each blade contains four core β-strands, labeled a, b, c, d. Conserved residues are highlighted in gray and residues mutated in GBM are shown in red. Insertions at the end of blades 5 and 6 are indicated in brackets. Figure discloses SEQ ID NO: 8478.

[0047] FIGS. 3A-B. Loss of C•••D• drives mesenchymal transformation of GBM. 3a, Immunofluorescence staining of human brain cortex using δ-catenin antibody (red, left panel); Nuclei are counterstained with Dapi (blue, right panel). 3b, Immunofluorescence staining of human primary GBM included in tissue microarrays (TMA) using δ-catenin antibody (red); Nuclei are counterstained with Dapi (blue). A representative δ-catenin-positive and negative tumor is shown in the left and right panel, respectively.

[0048] FIGS. 3C-D. Loss of C═••D• drives mesenchymal transformation of GBM. 3c, Kaplan-Meier analysis for glioma patients with low CTNND2 mRNA expression (≤2-fold, red line) compared with the rest of glioma (blue line). 3d, Kaplan-Meier analysis for glioma patients with low CTNND2 mRNA expression (≤2-fold) and decreased CTNND2 gene copy number (≤1) (red line) compared with the rest of glioma (blue line).

[0049] FIGS. 3E-F. Loss of C•••D• drives mesenchymal transformation of GBM. 3e, Growth rate of U87 glioma cells transduced with a lentivirus expressing δ-catenin (squares) or the empty vector (circles, average of triplicate cultures). 3f, Expression of mesenchymal genes in glioma cells expressing δ-catenin or the empty vector (averages of triplicate quantitative RT-PCR). All error bars are SD. *, p≤0.005; **, p≤0.001.

[0050] FIGS. 3G-H. Loss of C•••D• drives mesenchymal transformation of GBM. 3g, Immunofluorescence staining for βIII-tubulin (upper panels) and PSD95 (lower panels) in glioma cells expressing δ-catenin or the empty vector. 3h, Western blot using the indicated antibodies in glioma cells expressing δ-catenin or the empty vector. Vinculin is shown as control for loading.

[0051] FIG. 4A. EGFR-SEPT14 gene fusion identified by whole transcriptome sequencing. Split reads are shown aligning on the breakpoint. The predicted reading frame at the breakpoint is shown at the top with EGFR sequences in blue and SEPT14 in red. The amino acid sequence (TOP) is SEQ ID NO: 1; the nucleotide sequence (bottom) is SEQ ID NO: 2.

[0052] FIG. 4B. EGFR-SEPT14 gene fusion identified by whole transcriptome sequencing. (left panel), EGFR-SEPT14-specific PCR from cDNA derived from GBMs. Marker, 1 kb ladder. (right panel), Sanger sequencing chromatogram showing the reading frame at the breakpoint (SEQ ID NO: 4) and putative translation of the fusion protein (SEQ ID NO: 3) in the positive sample.

[0053] FIG. 4C. EGFR-SEPT14 gene fusion identified by whole transcriptome sequencing. EGFR-Septin14 fusion protein sequence (SEQ ID NO: 5) and schematics. Regions corresponding to EGFR and Septin14 are shown in blue (left hand side of diagram; (grey in black and white image; sequence comprising “MRP . . . VIQ” amino acids of SEQ ID NO: 5) and red (right hand side of diagram; light grey in black and white image; sequence comprising “LQD . . . RKK” amino acids of SEQ ID NO: 5), respectively. The fusion joins the tyrosine kinase domain of EGFR and the Coiled-coil domain of Septin14.

[0054] FIG. 4D. EGFR-SEPT14 gene fusion identified by whole transcriptome sequencing. Genomic fusion of EGFR exon 25 with intron 9 of SEPT14. In the fuse mRNA exon 24 of EGFR is spliced 5′ to exon 10 of SEPT14. Solid arrows indicate the position of the fusion genome primers that generate a fusion specific PCR product in the GBM sample TCGA-27-1837.

[0055] FIG. 5A. Expression of EGFR-SEPT14 fusion promotes an aggressive phenotype and inhibition of EGFR kinase delays GBM growth in vivo. Growth rate of SNB19 glioma cells transduced with a lentivirus expressing EGFR-SEPT14, EGFR Viii, EGFR WT or the empty vector (average of triplicate cultures).

[0056] FIG. 5B. Expression of EGFR-SEPT14 fusion promotes an aggressive phenotype and inhibition of EGFR kinase delays GBM growth in vivo. Migration assay in SNB19 glioma cells transduced with a lentivirus expressing EGFR-SEPT14, EGFR Viii, EGFR WT or the empty vector.

[0057] FIG. 5C. Expression of EGFR-SEPT14 fusion promotes an aggressive phenotype and inhibition of EGFR kinase delays GBM growth in vivo. Quantification of the cell covered area for the experiments shown in b (average of triplicate cultures). All error bars are SD.

[0058] FIG. 5D. Expression of EGFR-SEPT14 fusion promotes an aggressive phenotype and inhibition of EGFR kinase delays GBM growth in vivo. In vivo inhibition of tumor growth by EGFR kinase inhibitors in glioma patient derived xenografts carrying EGFR-SEPT14 fusion but not wild type EGFR. T-C indicates the median difference in survival between drug treated and vehicle (control) treated mice.

[0059] FIG. 5E. Expression of EGFR-SEPT14 fusion promotes an aggressive phenotype and inhibition of EGFR kinase delays GBM growth in vivo. Kinetics of tumor growth for the same xenografts treated with Lapatinib or vehicle (control). All error bars are SD.

[0060] FIG. 6 shows the distribution of substitutions from whole exome data.

[0061] FIG. 7. shows dinucleotide distribution in mutated sites.

[0062] FIG. 8. Sequence alignment of selected LZTR-1 orthologs. Mutations detected in GBM are indicated in red above of the aligned sequences. The LZTR-1 gene is present in most metazoans, including the sponge Amphimedon queenslandica, which is generally recognized as the most ancient surviving metazoan lineage¹⁷. LZTR-1 is also present in some near-metazoan unicellular protists, including Capsaspora owczarzaki (included in the Figure) and the choanoflagellates Salpingoeca rosetta and Monosiga brevicollis. These opisthokonts are key organisms for the study of the evolution of multicellularity, differentiation and cell-cell communication in animals and help in our understanding of the role of molecular pathways in cancer¹⁸. LZTR-1 has a characteristic Kelch-BTB-BACK-BTB-BACK domain architecture, and unlike the BTB-BACK-Kelch proteins⁸, there has been little, if any, duplication of the LZTR-1 gene since its appearance. Despite its name, LZTR-1 does not contain a leucine zipper region. Figure discloses SEQ ID NOS 8479-8482, respectively, in order of appearance.

[0063] FIG. 9. Sequence alignment of BTB-BACK domains. The two BTB-BACK domains of LZTR-1 are included along with the predicted secondary structure from HHpred⁶. The 3-box is the Cul3 binding element within the BACK domain. The secondary structure of KLHL3 (PDB ID 4HXI), KLHL11 (PDB ID 4AP2) and Gigaxonin (PDB ID 3HVE) are based on the crystal structures. The secondary structure of SPOP is based on a crystal structure for the BTB and 3-box region (PDB ID 3HTM) and HHpred predictions from the remainder of the BACK domain. Only the N-terminal half of the BACK domain from KLHL3, KLHL11 and Gigaxonin is included, as SPOP and LZTR-1 contain truncated versions of the BACK domain. Figure discloses SEQ ID NOS 8483-8488, respectively, in order of appearance.

[0064] FIG. 10A. Pattern of somatic mutations, CNVs and expression of CTNND2 in GBM. Schematic representation of identified somatic mutations in CTNND2 shown in the context of the known domain structure of the protein. Numbers refer to amino acid residues of the δ-catenin protein.

[0065] FIG. 10B. Pattern of somatic mutations, CNVs and expression of CTNND2 in GBM. Somatic deletions of CTNND2. Samples are sorted according to the focality of CTNND2 deletion. In the red-blue scale, white corresponds to normal (diploid) copy number, blue is deletion and red is gain.

[0066] FIG. 10C. Pattern of somatic mutations, CNVs and expression of CTNND2 in GBM. Pattern of expression of δ-catenin in the developing mouse brain (embryonic day 14.5), as determined by immunostaining. The highest levels of δ-catenin are detected in the cortical plate (CP) that contains differentiating neurons. IZ, intermediate zone; VZ/SVZ ventricular zone/subventricular zone; LV, lateral ventricle.

[0067] FIG. 10D. Pattern of somatic mutations, CNVs and expression of CTNND2 in GBM. CTNND2 mRNA expression analysis from Atlas-TCGA samples shows that CTNND2 is significantly down-regulated in the mesenchymal subgroup. In the green-red scale, black is the median, green is down-regulation and red is up-regulation.

[0068] FIG. 11A. EGFR-PSPH gene fusion identified by whole transcriptome sequencing. Split reads are shown aligning on the breakpoint. The predicted reading frame at the breakpoint is shown at the top with EGFR sequences in blue (grey in black and white image; encompassing “SRR . . . VIQ” amino acids and “AGT . . . CAG” nucleotides) and PSPH in red (light grey in black and white image; encompassing “DAF . . . QQV” amino acids and “GAT . . . CAA” nucleotides). The amino acid sequence (TOP) is SEQ ID NO: 7; the nucleotide sequence (bottom) is SEQ ID NO: 8.

[0069] FIG. 11B. EGFR-PSPH gene fusion identified by whole transcriptome sequencing. (left panel), EGFR-PSHP specific PCR from cDNA derived from GBMs. Marker, 1 kb ladder. (right panel), Sanger sequencing chromatogram showing the reading frame (SEQ ID NO: 10) at the breakpoint and putative translation of the fusion protein (SEQ ID NO: 9) in the positive sample.

[0070] FIG. 11C. EGFR-PSPH gene fusion identified by whole transcriptome sequencing. EGFR-PSPH fusion protein sequence (SEQ ID NO: 11) and schematics. Regions corresponding to EGFR and PSPH are shown in blue (grey in black and white image; left hand side of schematic; sequence comprising “MRP . . . VIQ” amino acids of SEQ ID NO: 11) and red (light grey in black and white image; right hand side of schematic, encompassing amino acids “DAF . . . LEE” of SEQ ID NO: 11), respectively. The fusion includes the tyrosine kinase domain of EGFR and the last 35 amino acids of PSPH.

[0071] FIG. 12A. NFASC-NTRK1 gene fusion identified by whole transcriptome sequencing. Split reads are shown aligning on the breakpoint. The predicted reading frame at the breakpoint is shown at the top with NFASC sequences in blue (grey in black and white image; encompassing “RVQ . . . GED” amino acids and “AGA . . . ATT” nucleotides) and NTRK1 in red (light grey in black and white image; encompassing “YTN . . . VGL” amino acids and “AGA . . . AAG” nucleotides). Figure discloses SEQ ID NOS 8489-8490, respectively, in order of appearance.

[0072] FIG. 12B. NFASC-NTRK1 gene fusion identified by whole transcriptome sequencing. (left panel), NFASC-NTRK1 specific PCR from cDNA derived from GBMs. Marker, 1 kb ladder. (right panel), Sanger sequencing chromatogram showing the reading frame (SEQ ID NO: 8491) at the breakpoint and putative translation of the fusion protein (SEQ ID NO: 8492) in the positive sample.

[0073] FIG. 12C. NFASC-NTRK1 gene fusion identified by whole transcriptome sequencing. NFASC-NTRK1 fusion protein sequence (SEQ ID NO: 8493) and schematics. Regions corresponding to NFASC and NTRK1 are shown in blue (grey in black and white image; sequence comprising “MAR . . . GED” amino acids) and red (light grey in black and white image; sequence comprising “YTN . . . VLG” amino acids), respectively. The fusion includes two of the five fibronectin-type III domain of neurofascin and the protein kinase domain of NTRK1.

[0074] FIG. 12D. NFASC-NTRK1 gene fusion identified by whole transcriptome sequencing. Genomic fusion of NFASC intron 9 with intron 21 of NTRK1. In the fuse mRNA exon 21 of NFASC is spliced 5′ to exon 10 of NTRK1. Solid arrows indicate the position of the fusion genome primers that generate a fusion specific PCR product in the GBM sample TCGA-06-5411.

[0075] FIG. 13 shows the expression measured by read depth from RNA-seq data. Note the very high level of expression in the regions of the genes implicated in the fusion events.

[0076] FIG. 14A. CAND1-EGFR gene fusion identified by whole transcriptome sequencing. Split reads are shown aligning on the breakpoint. The predicted reading frame at the breakpoint is shown at the top with CAND1 sequences in blue (grey in black and white image; sequence comprising “TSA . . . LSR” amino acids of SEQ ID NO: 13 and “TTA . . . CAG” nucleotides of SEQ ID NO: 14) and EGFR in red (light grey in black and white image; sequence comprising “CTG . . . VGX” amino acids of SEQ ID NO: 13 and “ATC . . . GGC” nucleotides of SEQ ID NO: 14). The amino acid sequence (TOP) is SEQ ID NO: 13; the nucleotide sequence (bottom) is SEQ ID NO: 14.

[0077] FIG. 14B. CAND1-EGFR gene fusion identified by whole transcriptome sequencing. (left panel), CAND1-EGFR specific PCR from cDNA derived from GBMs. Marker, 1 kb ladder. (right panel), Sanger sequencing chromatogram showing the reading frame at the breakpoint (SEQ ID NO: 15) and putative translation of the fusion protein (SEQ ID NO: 16) in the positive sample (boxed sequences). Figure also discloses SEQ ID NO: 8494.

[0078] FIG. 14C. CAND1-EGFR gene fusion identified by whole transcriptome sequencing. CAND1-EGFR fusion protein sequence (SEQ ID NO: 8495). Regions corresponding to CAND1 and EGFR are shown in blue (grey in black and white image; sequence comprising “MAS . . . LSR” amino acids of SEQ ID NO: 8495) and red (grey in black and white image; sequence comprising “CTG . . . IGA*” amino acids of SEQ ID NO: 8495), respectively.

[0079] FIG. 14D. CAND1-EGFR gene fusion identified by whole transcriptome sequencing. Genomic fusion of CAND1 intron 4 with intron 15 of EGFR. In the fuse mRNA exon 4 of CAND1 is spliced 5′ to exon 16 of EGFR.

[0080] FIG. 15 is a photographic image of a blot showing the interaction with Cul3 and protein stability of wild type and mutant LZTR-1. Lysates from SF188 glioma cells transfected with vectors expressing Myc-LZTR-1 and Flag-Cul3 or the empty vector were immunoprecipitated with Flag antibody and assayed by western blot with the indicated antibodies. *, non specific band; arrowhead indicates neddylated Cul3.

[0081] FIG. 16A are a photographic images of a blot showing the interaction with Cul3 and protein stability of wild type and mutant LZTR-1. In vitro analysis of the interaction between Cul3 and LZTR-1 wild type and GBM related mutants. Left panel, In vitro translated Myc-LZTR-1 input. Right panel, In vitro translated Myc-LZTR-1 was mixed with Flag-Cul3 immunoprecipitated from transfected HEK-293T cells. Bound proteins were analyzed by western blot using the indicated antibodies.

[0082] FIG. 16B is a photographic image of a blot showing the interaction with Cul3 and protein stability of wild type and mutant LZTR-1. Steady state protein levels of wild type LZTR-1 and GBM-related mutants.

[0083] FIG. 16C is a photographic image of a blot (top) and a graph (bottom) Top panel, Cells transfected with LZTR-1 wild type or the R810W mutant were treated with cycloexamide for the indicated time. Bottom panel, Quantification of LZTR-1 wild type and LZTR-1-R810W protein from the experiment in the left panel.

[0084] FIG. 16D is a photographic image of a blot showing the interaction with Cul3 and protein stability of wild type and mutant LZTR-1. Semi-quantitative RT-PCR evaluation of LZTR-1 wild type and LZTR-1-R810W RNA expression in cells transfected as in FIG. 16C.

[0085] FIG. 17A is a graph showing functional analysis of LZTR-1 wild type and GBM associated mutants in GBM-derived cells. GSEA shows up-regulation of genes associated with the phenotype of “spherical cultures” of glioma cells in primary human GBM carrying mutations in the LZTR-1 gene [Enrichment Score (ES)=0.754; P (family-wise error rate, FWER)=0.000 q (false discovery rate, FDR)=0.000].

[0086] FIG. 17B is a graph showing functional analysis of LZTR-1 wild type and GBM associated mutants in GBM-derived cells. Sphere forming assay (left panel) and western blot analysis (right panel) of GBM-derived glioma spheres (#48) expressing vector or LZTR-1. Data are Mean±SD of triplicate samples (p=0.0036). Error bars are SD.

[0087] FIG. 17C is a linear regression plot of in vitro limiting dilution assay using GBM-derived glioma spheres #46 expressing vector or LZTR-1. The frequency of sphere forming cells was 8.49±1.04 and 1.44±0.05% in vector and LZTR-1 expressing cells, respectively (p=0.00795). Each data point represents the average of triplicates. Error bars are SD.

[0088] FIG. 17D is a graph and photographic microscopy images showing functional analysis of LZTR-1 wild type and GBM associated mutants in GBM-derived cells. Left upper panels, Bright field microphotographs of GBM-derived line 46 cells six days after transduction with vector or LZTR-1 expressing lentivirus. Left lower panels, Bright field microphotographs of spheres from GBM-derived glioma cells #46 expressing lentivirus expressing vector or LZTR-1 from experiment in FIG. 17C. Right panel, The size of tumor spheres from cultures in c was determined by microscopy review after 14 days of culture. n=60 spheres from triplicates for each condition. Data are Mean±SD (p<0.0001). Error bars are SD.

[0089] FIG. 17E is a photographic image of a western blot analysis of GBM-derived cells #84 expressing vector or LZTR-1.

[0090] FIG. 17F is a linear regression plot of in vitro limiting dilution assay using GBM-derived line 84 expressing vector, LZTR-1, LZTR-1-R810W or LZTR-1-W437STOP. The frequency of sphere forming cells was 7.2±0.92 for vector, 1.48±0.09 for LZTR-1 wild type (p=0.0096); 7.82±0.99 for LZTR-1-R810W (p=0.2489); and 6.74±1.07 for LZTR-1-W437STOP (p=0.2269). Error bars are SD.

[0091] FIGS. 18A-B are photographic microscopy images showing expression of δ-catenin in neurons and δ-catenin driven loss of mesenchymal marker in GBM. FIG. 18A shows a pattern of expression of δ-catenin in the developing brain, as determined by immunostaining. Double immunofluorescence staining of brain cortex using δ-catenin antibody (red; dark grey in black and white image (center)) and βIII-tubulin (green; light grey in black and white image (right)); Nuclei are counterstained with Dapi (blue; grey in black and white image (Left)). FIG. 18B shows a pattern of expression of δ-catenin in the adult brain, as determined by immunostaining. Upper panels, Double immunofluorescence staining of brain cortex using δ-catenin antibody (red; dark grey in black and white image (center)) and MAP2 (green; light grey in black and white image (right)); Nuclei are counterstained with Dapi (blue; grey in black and white image (Left)). Lower panels, Double immunofluorescence staining of brain cortex using δ-catenin antibody (red; dark grey in black and white image) and GFAP (green; light grey in black and white image); Nuclei are counterstained with Dapi (blue; grey in black and white image).

[0092] FIG. 18C is a photographic image of a western blot using the indicated antibodies for U87 cells expressing δ-catenin wild type, glioma-associated δ-catenin mutants or the empty vector. FBN, fibronectin. Vinculin is shown as control for loading.

[0093] FIGS. 19A-B show a functional analysis of δ-catenin in mesenchymal GBM. FIG. 19A is a photographic microscopy image of immunofluorescence for fibronectin, collagen-5α1 (COL5A1) and smooth muscle actin (SMA) in glioma spheres #48 four days after infection with lentiviruses expressing δ-catenin or the empty vector. Nuclei are counterstained with Dapi. FIG. 19B is a bar graph showing the quantification of fluorescence intensity for SMA, COL5A1 and FBN for cultures treated as in a. n=3 independent experiments; data indicate mean±SD.

[0094] FIG. 19C is a bar graph showing the quantification of fluorescence intensity for βIII-tubulin in cells #48 infected with lentiviruses expressing CTNND2 or the empty vector.

[0095] FIG. 19D are photographic microscopy images showing time course analysis of βIII-tubulin expression in glioma spheres #48 transduced with lentiviruses expressing CTNND2 or the empty vector. Note the loss from the advanced culture of βIII-Tubulin expressing cells.

[0096] FIGS. 19E-F are graphs. FIG. 19E shows a linear regression plot of in vitro limiting dilution assay using GBM-derived cells #48 expressing vector or δ-catenin. The frequency of sphere forming cells was 7.42±1.16 and 0.88±0.02 for vector and δ-catenin, respectively (p=0.0098). Error bars are SD. FIG. 19F shows a longitudinal analysis of bioluminescence imaging in mice injected intracranially with GBM-derived line 48 expressing vector or δ-catenin. n=3 mice for vector and 5 for δ-catenin. Data are mean±SEM of photon counts.

[0097] FIGS. 20A-E show the functional analysis of EGFR-SEPT14 fusion and effect of inhibition of EGFR kinase on glioma growth. FIG. 20A is a graph of a sphere forming assay in the absence of EGF of GBM-derived primary cells (#48) expressing vector, EGFR wild type, EGFR Viii or EGFR-SEP14 fusion. Data are Mean±SD of triplicate samples (p=0.0051 and 0.027 for EGFR-SEP14 fusion and EGFR Viii compared with vector, respectively). FIG. 20B is a western blot analysis of GBM-derived primary cells (#48) expressing vector, EGFR Viii or EGFR-SEP14 fusion cultured in the presence of EGF. FIG. 20C is a photohraphic image of a blot showing GBM-derived cells (#48) expressing vector, EGFR Viii or EGFR-SEP14 fusion that were cultured in the absence of EGF for 48 h and then stimulated with EGF 20 ng/ml for the indicated time. Cells were assayed by western blot using the indicated antibodies. FIG. 20D is a graph of GSEA showing up-regulation of STAT3 target genes in primary human GBM carrying the EGFR-SEPT14 fusion gene [Enrichment Score (ES)=0.738; P (family-wise error rate, FWER)=0.000 q (false discovery rate, FDR)=0.000]. FIG. 20E is a bar graph showing the survival of GBM-derived cells (#48) expressing vector, EGFR wild type, EGFR Viii or EGFR-SEP14 fusion after treatment with lapatinib for 48 h at the indicated concentrations. Data are Mean±SD of triplicate samples.

[0098] FIG. 21 is a plot showing the number of mutations in TCGA samples harboring MutComFocal gene candidates. For a given gene G, the number of mutations M8 was plotted in samples harboring G as solid circles. The mean of M8 is also plotted as asterisks. Given the mean, μ and standard deviation 6 of the number of mutations in all TCGA samples, the 95% confidence interval of a sample being hyper-mutated (11±1.96*a) was plotted and shown that for all G, the mean of M8 falls well within the 95% confidence interval, demonstrating that MutComFocal genes do not tend to occur in hypermutated samples.

[0099] FIGS. 22A-B show pattern of somatic mutations, CNVs and expression of CTNND2 in GBM. FIG. 22A are photographic microscopy images of immunofluorescence staining of human primary GBM included in tissue microarrays (TMA) using δ-catenin antibody (red; dark grey in black and white image); Nuclei are counterstained with Dapi (blue; grey in black and white image). Two representative δ-catenin-positive and two δ-catenin-negative tumors are shown in the upper and lower panels, respectively. FIG. 22B is a Western Blot analysis of the expression of δ-catenin in a panel of GBM-derived glioma sphere cultures. Brain, normal human brain. Arrowhead indicated δ-catenin; Asterisk, non-specific band. Vinculin is shown as control for loading.

[0100] FIGS. 23A-B show the effects of expression of δ-catenin in glioma cells. FIG. 23A is a western blot using the indicated antibodies in glioma cells expressing δ-catenin or the empty vector. Vinculin is shown as control for loading. FIG. 23B are photographic microscopy images showing U87 glioma cells transduced with a lentivirus expressing wild type δ-catenin, δ-catenin GBM-derived mutants or the empty vector were analyzed by fluorescence microscopy.

[0101] FIG. 23C is a bar graph that shows the effects of expression of δ-catenin in glioma cells. The number of cells displaying neural processes was scored. At least 200 cells/sample were analyzed.

[0102] FIG. 23D are photographs of longitudinal bioluminescence imaging for one representative mouse injected intracranially with glioma sphere cells #48 transduced with lentivirus expressing CTNND2 (lower panels) or the empty vector (upper panels).

[0103] FIG. 24 is a heat map showing amplification surrounding the genomic neighborhood of EGFR, SEPT14, and PSPH among samples harboring EGFR fusions. Copy number was plotted log 2 ratio across the genomic region of chr7:55000000-56500000 for samples with EGFR-PSPH (top three rows) and EGFR-SEPT14 (bottom six rows). Genomic coordinates are also plotted for EGFR (blue; dark grey in black and white image), SEPT14 (yellow; light grey in black and white image), and PSPH (cyan; grey in black and white image).

[0104] FIG. 25 is a plot showing the expression of EGFR-SEPT14 fusion promotes an aggressive phenotype and inhibition of EGFR kinase delays GBM growth in vivo. Growth rate of U87 glioma cells transduced with a lentivirus expressing EGFR-SEPT14, EGFR Viii, EGFR WT or the empty vector (average of triplicate cultures).

[0105] FIG. 26 is a map showing differential expression of GBM tumor samples harboring EGFR-SEPT14 fusions and EGFRvlll rearrangements. After filtering for statistical significance for differential expression, ten genes remained that characterized the EGFR-SEPT14 phenotype from the EGFRvlll phenotype. Log 2 expression was plotted as a heat map. Samples were hierarchically clustered by Euclidean distance using average linkage. This clustering demonstrates clear separation between EGFR-SEPT14 samples (red; dark grey in black and white image; corresponding to top half of intensity bar of left hand side) and EGFRvlll samples (green; light grey in black and white image; corresponding to bottom half of intensity bar of left hand side), confirming the unique molecular signature of the EGFR-SEPT14 gene fusion.

[0106] FIG. 27 shows gene fusions identified through RNA sequencing.

[0107] FIG. 28 shows genomic breakpoints of gene fusions detected through whole-exome DNA sequencing.

[0108] FIG. 29 shows that an EGFR fusion molecule can also include a tyrosine kinase domain of an EGFR protein fused to a protein encoded by any one of the genes.

[0109] FIG. 30 shows relative expression of EGFR fusion and wild-type transcripts. Expression is estimated using the depth of reads covering the fusion breakpoint or wild-type exon junctions excluded from the fusion transcript. These wild-type exons include exons 25-26, 26-27, and 27-28.

[0110] FIG. 31 shows genomic breakpoints of gene fusions detected through whole-exome DNA sequencing.

[0111] FIG. 32 shows an analysis of the incidence of EGFR-SEPT14 and EGFR-PSPH gene fusions in GBM harboring or not the EGFRvIII rearrangement.

[0112] FIG. 33 shows enrichment of classical/mesenchymal subtype among samples with EGFR-SEPT14 or EGFR-PSPH.

[0113] FIG. 34 shows antibodies and concentrations used in immunofluorescence staining.

[0114] FIG. 35 shows antibodies and concentrations used for Western blots and immunoprecipitation assays.

[0115] FIG. 36 shows primers used for screening gene fusions from cDNA.

[0116] FIG. 37 shows primers used for genomic detection of gene fusions.

[0117] FIG. 38 shows primers used for semiquantitative RT-PCR to detect exogenous Myc-LZTR1 WT and mutant LZTR1-R801W

### DETAILED DESCRIPTION OF THE INVENTION

[0118] Gene fusions retaining the RTK-coding domain of EGFR are the most frequent gene fusion events in GBM. EGFR gene fusions occur in 7.6% of GBM patients and frequently implicate the Sept14 gene as the 3′ partner in the fusion, with a consistent breakpoint at the RNA level. This makes the EGFR fusions highly manageable genetic alterations both diagnostically and therapeutically. In one embodiment, EGFR fusions enhance the proliferative and migratory capacity of glioma cells. In another embodiment, the EGFR fusions also confer sensitivity to EGFR inhibition to human GBM grown as mouse xenografts. Gene fusions encompassing RTK-coding genes are thus implicated in the pathogenesis of GBM and provide a strong rationale for the inclusion of GBM patients harboring EGFR fusions in clinical trials based on EGFR inhibitors. The target population of GBM patients who may carry EGFR gene fusions can benefit from targeted inhibition of EGFR kinase activity, and is estimated to correspond to 20,000 patients per year world-wide (˜1,000 in USA/year).

[0119] Glioblastoma multiformes (GBMs) are the most common form of brain tumors in adults accounting for 12-15% of intracranial tumors and 50-60% of primary brain tumors. GBM is among the most lethal forms of human cancer. The history of successful targeted therapy of cancer largely coincides with the inactivation of recurrent and oncogenic gene fusions in hematological malignancies and recently in some types of epithelial cancer. GBM is among the most lethal and incurable forms of human cancer. Targeted therapies against common genetic alterations in GBM have not changed the dismal clinical outcome of the disease, most likely because they have systematically failed to eradicate the truly addicting oncoprotein activities of GBM. Recurrent chromosomal rearrangements resulting in the creation of oncogenic gene fusions have not been found in GBM.

[0120] GBM is among the most difficult forms of cancer to treat in humans (1). So far, the therapeutic approaches that have been tested against potentially important oncogenic targets in GBM have met limited success (2-4). Recurrent chromosomal translocations leading to production of oncogenic fusion proteins are viewed as initiating and addicting events in the pathogenesis of human cancer, thus providing the most desirable molecular targets for cancer therapy (5, 6). Recurrent and oncogenic gene fusions have not been found in GBM. Chromosomal rearrangements are hallmarks of hematological malignancies but recently they have also been uncovered in subsets of solid tumors (breast, prostate, lung and colorectal carcinoma) (7, 8). Important and successful targeted therapeutic interventions for patients whose tumors carry these rearrangements have stemmed from the discovery of functional gene fusions, especially when the translocations involve kinase-coding genes (BCR-ABL, EML4-ALK) (9, 10). GBM, the most common malignant brain tumor, remains one of the most challenging forms of cancer to treat. The abundance of passenger mutations and large regions of copy number alterations has complicated the definition of the landscape of driver mutations in glioblastoma.

[0121] A hallmark of GBM is rampant chromosomal instability (CIN), which leads to aneuploidy (11). CIN and aneuploidy are early events in the pathogenesis of cancer (12). Without being bound by theory, genetic alterations targeting mitotic fidelity might be responsible for missegregation of chromosomes during mitosis, resulting in aneuploidy (13, 14).

[0122] Epidermal growth factor receptors (EGFR) are transmembrane glycoproteins and members of the protein kinase superfamily. This protein is a receptor for members of the epidermal growth factor family. EGFR is a cell surface protein that binds to epidermal growth factor. Binding of the protein to a ligand induces receptor dimerization and tyrosine autophosphorylation and leads to cell proliferation. Mutations that lead to EGFR overexpression or overactivity have been associated with a number of cancers, including lung cancer, anal cancers and glioblastoma multiforme.

[0123] Phosphoserine phosphatase (PSPH) is an enzyme responsible for the third and last step in L-serine formation. It catalyzes magnesium-dependent hydrolysis of L-phosphoserine and is also involved in an exchange reaction between L-serine and L-phosphoserine. Deficiency of this protein is thought to be linked to Williams syndrome.

[0124] The singular forms “a,” “an,” and “the” include plural reference unless the context clearly dictates otherwise.

[0125] The term “about” is used herein to mean approximately, in the region of, roughly, or around. When the term “about” is used in conjunction with a numerical range, it modifies that range by extending the boundaries above and below the numerical values set forth. In general, the term “about” is used herein to modify a numerical value above and below the stated value by a variance of 20%.

### DNA and AminoAcid Manipulation Methods and Purification Thereof

[0126] The practice of aspects of the present invention can employ, unless otherwise indicated, conventional techniques of cell biology, cell culture, molecular biology, transgenic biology, microbiology, recombinant DNA, and immunology, which are within the skill of the art. Such techniques are explained fully in the literature. See, e.g., Molecular Cloning A Laboratory Manual, 3^{rd} Ed., ed. by Sambrook (2001), Fritsch and Maniatis (Cold Spring Harbor Laboratory Press: 1989); DNA Cloning, Volumes I and II (D. N. Glover ed., 1985); Oligonucleotide Synthesis (M. J. Gait ed., 1984); Mullis et al. U.S. Pat. No. 4,683,195; Nucleic Acid Hybridization (B. D. Hames & S. J. Higgins eds. 1984); Transcription and Translation (B. D. Hames & S. J. Higgins eds. 1984); Culture Of Animal Cells (R. I. Freshney, Alan R. Liss, Inc., 1987); Immobilized Cells and Enzymes (IRL Press, 1986); B. Perbal, A Practical Guide To Molecular Cloning (1984); the series, Methods In Enzymology (Academic Press, Inc., N.Y.), specifically, Methods In Enzymology, Vols. 154 and 155 (Wu et al. eds.); Gene Transfer Vectors For Mammalian Cells (J. H. Miller and M. P. Calos eds., 1987, Cold Spring Harbor Laboratory); Immunochemical Methods In Cell And Molecular Biology (Caner and Walker, eds., Academic Press, London, 1987); Handbook Of Experimental Immunology, Volumes I-IV (D. M. Weir and C. C. Blackwell, eds., 1986); Manipulating the Mouse Embryo, (Cold Spring Harbor Laboratory Press, Cold Spring Harbor, N.Y., 1986). All patents, patent applications and references cited herein are incorporated by reference in their entireties.

[0127] One skilled in the art can obtain a protein in several ways, which include, but are not limited to, isolating the protein via biochemical means or expressing a nucleotide sequence encoding the protein of interest by genetic engineering methods.

[0128] A protein is encoded by a nucleic acid (including, for example, genomic DNA, complementary DNA (cDNA), synthetic DNA, as well as any form of corresponding RNA). For example, it can be encoded by a recombinant nucleic acid of a gene. The proteins of the invention can be obtained from various sources and can be produced according to various techniques known in the art. For example, a nucleic acid that encodes a protein can be obtained by screening DNA libraries, or by amplification from a natural source. A protein can be a fragment or portion thereof. The nucleic acids encoding a protein can be produced via recombinant DNA technology and such recombinant nucleic acids can be prepared by conventional techniques, including chemical synthesis, genetic engineering, enzymatic techniques, or a combination thereof. For example, a fusion protein of the invention comprises a tyrosine kinase domain of an EGFR protein fused to a polypeptide that constitutively activates the tyrosine kinase domain of the EGFR protein. For example, the fusion protein can be an EGFR-SEPT fusion protein, an EGFR-PSPH fusion protein, or an EGFR-CAND fusion protein. An example of an EGFR-SEPT fusion protein is EGFR-SEPT14. In one embodiment, an EGFR-SEPT14 fusion polypeptide can have the amino acid sequence shown in SEQ ID NO: 1, 3, or 5. An example of an EGFR-PSPH fusion protein is a polypeptide having the amino acid sequence shown in SEQ ID NO: 7, 9, or 11. An example of an EGFR-CAND fusion protein is EGFR-CAND1. In one embodiment, an EGFR-CAND1 fusion polypeptide can have the amino acid sequence shown in SEQ ID NO: 13, 16, or 8495.

[0129] The Genbank ID for the EGFR gene is 1956. Four isoforms are listed for EGFR, e.g., having Genebank Accession Nos. NP_005219 (corresponding nucleotide sequence NM_005228); NP_958439 (corresponding nucleotide sequence NM_201282); NP_958440 (corresponding nucleotide sequence NM_201283); NP_958441 (corresponding nucleotide sequence NM_201284). The nucleotide and amino acid sequences can be readily obtained by one of ordinary skill in the art using the listed accession numbers.

[0130] The Genbank ID for the SEPT14 gene is 346288. The Genebank Accession No. for SEPT14 is NP_997249 (corresponding nucleotide sequence NM_207366). The nucleotide and amino acid sequences can be readily obtained by one of ordinary skill in the art using the listed accession numbers.

[0131] The Genbank ID for the PSPH gene is 5723. The Genebank Accession No. for PSPH is NP_004568 (corresponding nucleotide sequence NM_004577). The nucleotide and amino acid sequences can be readily obtained by one of ordinary skill in the art using the listed accession numbers.

[0132] The Genbank ID for the CAND1 gene is 55832. The Genebank Accession No. for CAND1 is NP_060918 (corresponding nucleotide sequence NM_018448). The nucleotide and amino acid sequences can be readily obtained by one of ordinary skill in the art using the listed accession numbers.

[0133] As used herein, an “EGFR fusion molecule” can be a nucleic acid which encodes a polypeptide corresponding to a fusion protein comprising a tyrosine kinase domain of an EGFR protein fused to a polypeptide that constitutively activates the tyrosine kinase domain of the EGFR protein. For example, an EGFR fusion molecule can include an EGFR-SEPT fusion (e.g., an EGFR-SEPT14 fusion polypeptide comprising the amino acid sequence shown in SEQ ID NO: 1, 3, or 5, or comprising the nucleic acid sequence shown in SEQ ID NO: 2 or 4); an EGFR-PSPH fusion, (e.g., comprising the amino acid sequence shown in SEQ ID NO: 7, 9, or 11, or comprising the nucleic acid sequence shown in SEQ ID NO: 8 or 10), or an EGFR-CAND fusion (e.g., an EGFR-CAND1 fusion polypeptide comprising the amino acid sequence shown in SEQ ID NO: 13, 16, or 8495, or comprising the nucleic acid sequence shown in SEQ ID NO: 14 or 15). For example, an EGFR fusion molecule can include an EGFR-containing fusion comprising the amino acid sequence corresponding to Genebank Accession no. NP_005219, NP_958439, NP_958440, or NP_958441. AN EGFR fusion molecule can also include a tyrosine kinase domain of an EGFR protein fused to a protein encoded by any one of the genes listed in FIG. 29. AN EGFR fusion molecule can include a variant of the above described examples, such as a fragment thereof.

[0134] The nucleic acid can be any type of nucleic acid, including genomic DNA, complementary DNA (cDNA), recombinant DNA, synthetic or semi-synthetic DNA, as well as any form of corresponding RNA. A cDNA is a form of DNA artificially synthesized from a messenger RNA template and is used to produce gene clones. A synthetic DNA is free of modifications that can be found in cellular nucleic acids and include, but are not limited to, histones and methylation. For example, a nucleic acid encoding an an EGFR EGFR fusion molecule can comprise a recombinant nucleic acid encoding such a protein. The nucleic acid can be a non-naturally occurring nucleic acid created artificially (such as by assembling, cutting, ligating or amplifying sequences). It can be double-stranded or single-stranded.

[0135] The invention further provides for nucleic acids that are complementary to an EGFR fusion molecule. Complementary nucleic acids can hybridize to the nucleic acid sequence described above under stringent hybridization conditions. Non-limiting examples of stringent hybridization conditions include temperatures above 30° C., above 35° C., in excess of 42° C., and/or salinity of less than about 500 mM, or less than 200 mM. Hybridization conditions can be adjusted by the skilled artisan via modifying the temperature, salinity and/or the concentration of other reagents such as SDS or SSC.

[0136] According to the invention, protein variants can include amino acid sequence modifications. For example, amino acid sequence modifications fall into one or more of three classes: substitutional, insertional or deletional variants. Insertions can include amino and/or carboxyl terminal fusions as well as intrasequence insertions of single or multiple amino acid residues. Insertions ordinarily will be smaller insertions than those of amino or carboxyl terminal fusions, for example, on the order of one to four residues. Deletions are characterized by the removal of one or more amino acid residues from the protein sequence. These variants ordinarily are prepared by site-specific mutagenesis of nucleotides in the DNA encoding the protein, thereby producing DNA encoding the variant, and thereafter expressing the DNA in recombinant cell culture.

[0137] In one embodiment, an EGFR fusion molecule comprises a protein or polypeptide encoded by a nucleic acid sequence encoding an EGFR fusion molecule, such as the sequences shown in SEQ ID NOS: 2, 4, 8, 10, 14, or 15. In some embodiments, the nucleic acid sequence encoding an EGFR fusion molecule is about 70%, about 75%, about 80%, about 85%, about 90%, about 93%, about 95%, about 97%, about 98%, or about 99% identical to SEQ ID NOS: 2, 4, 8, 10, 14, or 15. In another embodiment, the polypeptide can be modified, such as by glycosylations and/or acetylations and/or chemical reaction or coupling, and can contain one or several non-natural or synthetic amino acids. An example of an EGFR fusion molecule is the polypeptide having the amino acid sequence shown in SEQ ID NOS: 1, 3, 5, 7, 9, 11, 13, 16, or 8495. In some embodiments, the EGFR fusion molecule that is a polypeptide is about 70%, about 75%, about 80%, about 85%, about 90%, about 93%, about 95%, about 97%, about 98%, or about 99% identical to SEQ ID NOS: 1, 3, 5, 7, 9, 11, 13, 16, or 8495. In another embodiment, an EGFR fusion molecule can be a fragment of an EGFR fusion protein. For example, the EGFR fusion molecule can encompass any portion of at least about 8 consecutive amino acids of SEQ ID NOS: 1, 3, 5, 7, 9, 11, 13, 16, or 8495. The fragment can comprise at least about 10 amino acids, a least about 20 amino acids, at least about 30 amino acids, at least about 40 amino acids, at least about 50 amino acids, at least about 60 amino acids, or at least about 75 amino acids of SEQ ID NOS: 1, 3, 5, 7, 9, 11, 13, 16, or 8495. Fragments include all possible amino acid lengths between about 8 and about 100 amino acids, for example, lengths between about 10 and about 100 amino acids, between about 15 and about 100 amino acids, between about 20 and about 100 amino acids, between about 35 and about 100 amino acids, between about 40 and about 100 amino acids, between about 50 and about 100 amino acids, between about 70 and about 100 amino acids, between about 75 and about 100 amino acids, or between about 80 and about 100 amino acids. Fragments include all possible amino acid lengths between about 100 and 800 amino acids, for example, lengths between about 125 and 800 amino acids, between about 150 and 800 amino acids, between about 175 and 800 amino acids, between about 200 and 800 amino acids, between about 225 and 800 amino acids, between about 250 and 800 amino acids, between about 275 and 800 amino acids, between about 300 and 800 amino acids, between about 325 and 800 amino acids, between about 350 and 800 amino acids, between about 375 and 800 amino acids, between about 400 and 800 amino acids, between about 425 and 800 amino acids, between about 450 and 800 amino acids, between about 475 and 800 amino acids, between about 500 and 800 amino acids, between about 525 and 800 amino acids, between about 550 and 800 amino acids, between about 575 and 800 amino acids, between about 600 and 800 amino acids, between about 625 and 800 amino acids, between about 650 and 800 amino acids, between about 675 and 800 amino acids, between about 700 and 800 amino acids, between about 725 and 800 amino acids, between about 750 and 800 amino acids, or between about 775 and 800 amino acids.

[0138] Chemical Synthesis. Nucleic acid sequences encoding an EGFR fusion molecule can be synthesized, in whole or in part, using chemical methods known in the art. Alternatively, a polypeptide can be produced using chemical methods to synthesize its amino acid sequence, such as by direct peptide synthesis using solid-phase techniques. Protein synthesis can either be performed using manual techniques or by automation. Automated synthesis can be achieved, for example, using Applied Biosystems 431A Peptide Synthesizer (Perkin Elmer).

[0139] Optionally, polypeptides fragments can be separately synthesized and combined using chemical methods to produce a full-length molecule. For example, these methods can be utilized to synthesize a fusion protein of the invention. In one embodiment, a fusion protein of the invention comprises a tyrosine kinase domain of an EGFR protein fused to a polypeptide that constitutively activates the tyrosine kinase domain of the EGFR protein. For example, the fusion protein can be an EGFR-SEPT fusion protein, an EGFR-PSPH fusion protein, or an EGFR-CAND fusion protein. An example of an EGFR-SEPT fusion protein is EGFR-SEPT14. In one embodiment, an EGFR-SEPT14 fusion polypeptide can have the amino acid sequence shown in SEQ ID NO: 1, 3, or 5. An example of an EGFR-PSPH fusion protein is a polypeptide having the amino acid sequence shown in SEQ ID NO: 7, 9, or 11. An example of an EGFR-CAND fusion protein is EGFR-CAND1. In one embodiment, an EGFR-CAND1 fusion polypeptide can have the amino acid sequence shown in SEQ ID NO: 13, 16, or 8495.

[0140] Obtaining, Purifying and Detecting EGFR fusion molecules. A polypeptide encoded by a nucleic acid, such as a nucleic acid encoding an EGFR fusion molecule, or a variant thereof, can be obtained by purification from human cells expressing a protein or polypeptide encoded by such a nucleic acid. Non-limiting purification methods include size exclusion chromatography, ammonium sulfate fractionation, ion exchange chromatography, affinity chromatography, and preparative gel electrophoresis.

[0141] A synthetic polypeptide can be substantially purified via high performance liquid chromatography (HPLC), such as ion exchange chromatography (IEX-HPLC). The composition of a synthetic polypeptide, such as an EGFR fusion molecule, can be confirmed by amino acid analysis or sequencing.

[0142] Other constructions can also be used to join a nucleic acid sequence encoding a polypeptide/protein of the claimed invention to a nucleotide sequence encoding a polypeptide domain which will facilitate purification of soluble proteins. Such purification facilitating domains include, but are not limited to, metal chelating peptides such as histidine-tryptophan modules that allow purification on immobilized metals, protein A domains that allow purification on immobilized immunoglobulin, and the domain utilized in the FLAGS extension/affinity purification system (Immunex Corp., Seattle, Wash.). Including cleavable linker sequences (i.e., those specific for Factor Xa or enterokinase (Invitrogen, San Diego, Calif)) between the purification domain and a polypeptide encoded by a nucleic acid of the invention also can be used to facilitate purification. For example, the skilled artisan can use an expression vector encoding 6 histidine residues that precede a thioredoxin or an enterokinase cleavage site in conjunction with a nucleic acid of interest. The histidine residues facilitate purification by immobilized metal ion affinity chromatography, while the enterokinase cleavage site provides a means for purifying the polypeptide encoded by, for example, an EGFR-SEPT, EGFR-CAND, EGFR-PSPH, or EGFR-containing, nucleic acid.

[0143] Host cells which contain a nucleic acid encoding an EGFR fusion molecule, and which subsequently express the same, can be identified by various procedures known to those of skill in the art. These procedures include, but are not limited to, DNA-DNA or DNA-RNA hybridizations and protein bioassay or immunoassay techniques which include membrane, solution, or chip-based technologies for the detection and/or quantification of nucleic acid or protein. For example, the presence of a nucleic acid encoding an EGFR fusion molecule can be detected by DNA-DNA or DNA-RNA hybridization or amplification using probes or fragments of nucleic acids encoding the same. In one embodiment, a nucleic acid fragment of an EGFR fusion molecule can encompass any portion of at least about 8 consecutive nucleotides of SEQ ID NOS: 2, 8, or 14. In another embodiment, the fragment can comprise at least about 10 consecutive nucleotides, at least about 15 consecutive nucleotides, at least about 20 consecutive nucleotides, or at least about 30 consecutive nucleotides of SEQ ID NOS: 2, 8, or 14. Fragments can include all possible nucleotide lengths between about 8 and about 100 nucleotides, for example, lengths between about 15 and about 100 nucleotides, or between about 20 and about 100 nucleotides. Nucleic acid amplification-based assays involve the use of oligonucleotides selected from sequences encoding an EGFR fusion molecule nucleic acid, or EGFR fusion molecule nucleic acid to detect transformants which contain a nucleic acid encoding a protein or polypeptide of the same.

[0144] Protocols are known in the art for detecting and measuring the expression of a polypeptide encoded by a nucleic acid, such as a nucleic acid encoding an EGFR fusion molecule, using either polyclonal or monoclonal antibodies specific for the polypeptide. Non-limiting examples include enzyme-linked immunosorbent assay (ELISA), radioimmunoassay (RIA), and fluorescence activated cell sorting (FACS). A two-site, monoclonal-based immunoassay using monoclonal antibodies reactive to two non-interfering epitopes on a polypeptide encoded by a nucleic acid, such as a nucleic acid encoding an EGFR fusion molecule, can be used, or a competitive binding assay can be employed.

[0145] Labeling and conjugation techniques are known by those skilled in the art and can be used in various nucleic acid and amino acid assays. Methods for producing labeled hybridization or PCR probes for detecting sequences related to nucleic acid sequences encoding a protein, such as EGFR fusion molecule, include, but are not limited to, oligolabeling, nick translation, end-labeling, or PCR amplification using a labeled nucleotide. Alternatively, nucleic acid sequences, such as nucleic acids encoding an EGFR fusion molecule, can be cloned into a vector for the production of an mRNA probe. Such vectors are known in the art, are commercially available, and can be used to synthesize RNA probes in vitro by addition of labeled nucleotides and an appropriate RNA polymerase such as T7, T3, or SP6. These procedures can be conducted using a variety of commercially available kits (Amersham Pharmacia Biotech, Promega, and US Biochemical). Suitable reporter molecules or labels which can be used for ease of detection include radionuclides, enzymes, and fluorescent, chemiluminescent, or chromogenic agents, as well as substrates, cofactors, inhibitors, and/or magnetic particles.

[0146] A fragment can be a fragment of a protein, such as an EGFR fusion protein. For example, a fragment of an EGFR fusion can encompass any portion of at least about 8 consecutive amino acids of SEQ ID NOS: 1, 3, 5, 7, 9, 11, 13, 16, or 8495. The fragment can comprise at least about 10 consecutive amino acids, at least about 20 consecutive amino acids, at least about 30 consecutive amino acids, at least about 40 consecutive amino acids, a least about 50 consecutive amino acids, at least about 60 consecutive amino acids, at least about 70 consecutive amino acids, at least about 75 consecutive amino acids, at least about 80 consecutive amino acids, at least about 85 consecutive amino acids, at least about 90 consecutive amino acids, at least about 95 consecutive amino acids, at least about 100 consecutive amino acids, at least about 200 consecutive amino acids, at least about 300 consecutive amino acids, at least about 400 consecutive amino acids, at least about 500 consecutive amino acids, at least about 600 consecutive amino acids, at least about 700 consecutive amino acids, or at least about 800 consecutive amino acids of SEQ ID NOS: 1, 3, 5, 7, 9, 11, 13, 16, or 8495. Fragments include all possible amino acid lengths between about 8 and 100 about amino acids, for example, lengths between about 10 and about 100 amino acids, between about 15 and about 100 amino acids, between about 20 and about 100 amino acids, between about 35 and about 100 amino acids, between about 40 and about 100 amino acids, between about 50 and about 100 amino acids, between about 70 and about 100 amino acids, between about 75 and about 100 amino acids, or between about 80 and about 100 amino acids.

### Cell Transfection

[0147] Host cells transformed with a nucleic acid sequence of interest can be cultured under conditions suitable for the expression and recovery of the protein from cell culture. The polypeptide produced by a transformed cell can be secreted or contained intracellularly depending on the sequence and/or the vector used. Expression vectors containing a nucleic acid sequence, such as a nucleic acid encoding an EGFR fusion molecule, can be designed to contain signal sequences which direct secretion of soluble polypeptide molecules encoded by the nucleic acid. Cell transfection and culturing methods are described in more detail below.

[0148] A eukaryotic expression vector can be used to transfect cells in order to produce proteins encoded by nucleotide sequences of the vector, e.g. those encoding an EGFR fusion molecule. Mammalian cells can contain an expression vector (for example, one that contains a nucleic acid encoding a fusion protein comprising a tyrosine kinase domain of an EGFR protein fused to a polypeptide that constitutively activates the tyrosine kinase domain of the EGFR protein) via introducing the expression vector into an appropriate host cell via methods known in the art.

[0149] A host cell strain can be chosen for its ability to modulate the expression of the inserted sequences or to process the expressed polypeptide encoded by a nucleic acid, in the desired fashion. Such modifications of the polypeptide include, but are not limited to, acetylation, carboxylation, glycosylation, phosphorylation, lipidation, and acylation. Post-translational processing which cleaves a “prepro” form of the polypeptide also can be used to facilitate correct insertion, folding and/or function. Different host cells which have specific cellular machinery and characteristic mechanisms for post-translational activities (e.g., CHO, HeLa, MDCK, HEK293, and WI38), are available from the American Type Culture Collection (ATCC; 10801 University Boulevard, Manassas, Va. 20110-2209) and can be chosen to ensure the correct modification and processing of the foreign protein.

[0150] An exogenous nucleic acid can be introduced into a cell via a variety of techniques known in the art, such as lipofection, microinjection, calcium phosphate or calcium chloride precipitation, DEAE-dextran-mediated transfection, or electroporation. Electroporation is carried out at approximate voltage and capacitance to result in entry of the DNA construct(s) into cells of interest (such as glioma cells (cell line SF188), neuroblastoma cells (cell lines IMR-32, SK-N-SH, SH-F and SH-N), astrocytes and the like). Other transfection methods also include modified calcium phosphate precipitation, polybrene precipitation, liposome fusion, and receptor-mediated gene delivery.

[0151] Cells that will be genetically engineered can be primary and secondary cells obtained from various tissues, and include cell types which can be maintained and propagated in culture. Non-limiting examples of primary and secondary cells include epithelial cells, neural cells, endothelial cells, glial cells, fibroblasts, muscle cells (such as myoblasts) keratinocytes, formed elements of the blood (e.g., lymphocytes, bone marrow cells), and precursors of these somatic cell types.

[0152] Vertebrate tissue can be obtained by methods known to one skilled in the art, such a punch biopsy or other surgical methods of obtaining a tissue source of the primary cell type of interest. In one embodiment, a punch biopsy or removal (e.g., by aspiration) can be used to obtain a source of cancer cells (for example, glioma cells, neuroblastoma cells, and the like). A mixture of primary cells can be obtained from the tissue, using methods readily practiced in the art, such as explanting or enzymatic digestion (for examples using enzymes such as pronase, trypsin, collagenase, elastase dispase, and chymotrypsin). Biopsy methods have also been described in U.S. Pat. No. 7,419,661 and PCT application publication WO 2001/32840, and each are hereby incorporated by reference.

[0153] Primary cells can be acquired from the individual to whom the genetically engineered primary or secondary cells are administered. However, primary cells can also be obtained from a donor, other than the recipient, of the same species. The cells can also be obtained from another species (for example, rabbit, cat, mouse, rat, sheep, goat, dog, horse, cow, bird, or pig). Primary cells can also include cells from an isolated or purified vertebrate tissue source grown attached to a tissue culture substrate (for example, flask or dish) or grown in a suspension; cells present in an explant derived from tissue; both of the aforementioned cell types plated for the first time; and cell culture suspensions derived from these plated cells. Secondary cells can be plated primary cells that are removed from the culture substrate and replated, or passaged, in addition to cells from the subsequent passages. Secondary cells can be passaged one or more times. These primary or secondary cells can contain expression vectors having a gene that encodes an EGFR fusion molecule.

### Cell Culturing

[0154] Various culturing parameters can be used with respect to the host cell being cultured. Appropriate culture conditions for mammalian cells are well known in the art (Cleveland W L, et al., J Immunol Methods, 1983, 56(2): 221-234) or can be determined by the skilled artisan (see, for example, Animal Cell Culture: A Practical Approach 2nd Ed., Rickwood, D. and Hames, B. D., eds. (Oxford University Press: New York, 1992)). Cell culturing conditions can vary according to the type of host cell selected. Commercially available medium can be utilized. Non-limiting examples of medium include, for example, Minimal Essential Medium (MEM, Sigma, St. Louis, Mo.); Dulbecco's Modified Eagles Medium (DMEM, Sigma); Ham's F10 Medium (Sigma); HyClone cell culture medium (HyClone, Logan, Utah); RPMI-1640 Medium (Sigma); and chemically-defined (CD) media, which are formulated for various cell types, e.g., CD-CHO Medium (Invitrogen, Carlsbad, Calif).

[0155] The cell culture media can be supplemented as necessary with supplementary components or ingredients, including optional components, in appropriate concentrations or amounts, as necessary or desired. Cell culture medium solutions provide at least one component from one or more of the following categories: (1) an energy source, usually in the form of a carbohydrate such as glucose; (2) all essential amino acids, and usually the basic set of twenty amino acids plus cysteine; (3) vitamins and/or other organic compounds required at low concentrations; (4) free fatty acids or lipids, for example linoleic acid; and (5) trace elements, where trace elements are defined as inorganic compounds or naturally occurring elements that can be required at very low concentrations, usually in the micromolar range.

[0156] The medium also can be supplemented electively with one or more components from any of the following categories: (1) salts, for example, magnesium, calcium, and phosphate; (2) hormones and other growth factors such as, serum, insulin, transferrin, and epidermal growth factor; (3) protein and tissue hydrolysates, for example peptone or peptone mixtures which can be obtained from purified gelatin, plant material, or animal byproducts; (4) nucleosides and bases such as, adenosine, thymidine, and hypoxanthine; (5) buffers, such as HEPES; (6) antibiotics, such as gentamycin or ampicillin; (7) cell protective agents, for example pluronic polyol; and (8) galactose. In one embodiment, soluble factors can be added to the culturing medium.

[0157] The mammalian cell culture that can be used with the present invention is prepared in a medium suitable for the type of cell being cultured. In one embodiment, the cell culture medium can be any one of those previously discussed (for example, MEM) that is supplemented with serum from a mammalian source (for example, fetal bovine serum (FBS)). In another embodiment, the medium can be a conditioned medium to sustain the growth of host cells.

[0158] Three-dimensional cultures can be formed from agar (such as Gey's Agar), hydrogels (such as matrigel, agarose, and the like; Lee et al., (2004) Biomaterials 25: 2461-2466) or polymers that are cross-linked. These polymers can comprise natural polymers and their derivatives, synthetic polymers and their derivatives, or a combination thereof. Natural polymers can be anionic polymers, cationic polymers, amphipathic polymers, or neutral polymers. Non-limiting examples of anionic polymers can include hyaluronic acid, alginic acid (alginate), carageenan, chondroitin sulfate, dextran sulfate, and pectin. Some examples of cationic polymers include but are not limited to, chitosan or polylysine. (Peppas et al., (2006) Adv Mater. 18: 1345-60; Hoffman, A. S., (2002) Adv Drug Deliv Rev. 43: 3-12; Hoffman, A. S., (2001) Ann NY Acad Sci 944: 62-73). Examples of amphipathic polymers can include, but are not limited to collagen, gelatin, fibrin, and carboxymethyl chitin. Non-limiting examples of neutral polymers can include dextran, agarose, or pullulan. (Peppas et al., (2006) Adv Mater. 18: 1345-60; Hoffman, A. S., (2002) Adv Drug Deliv Rev. 43: 3-12; Hoffman, A. S., (2001) Ann NY Acad Sci 944: 62-73).

[0159] Cells to be cultured can harbor introduced expression vectors, such as plasmids. The expression vector constructs can be introduced via transformation, microinjection, transfection, lipofection, electroporation, or infection. The expression vectors can contain coding sequences, or portions thereof, encoding the proteins for expression and production. Expression vectors containing sequences encoding the produced proteins and polypeptides, as well as the appropriate transcriptional and translational control elements, can be generated using methods well known to and practiced by those skilled in the art. These methods include synthetic techniques, in vitro recombinant DNA techniques, and in vivo genetic recombination which are described in J. Sambrook et al., 2001, Molecular Cloning, A Laboratory Manual, Cold Spring Harbor Press, Plainview, N.Y. and in F. M. Ausubel et al., 1989, Current Protocols in Molecular Biology, John Wiley & Sons, New York, N.Y.

### EGFR Fusion Molecule Inhibitors

[0160] The invention provides methods for use of compounds that decrease the expression level or activity of an EFGR EGFR fusion molecule in a subject. In addition, the invention provides methods for using compounds for the treatment of a gene-fusion associated cancer. In one embodiment, the gene-fusion associated cancer comprises glioblastoma multiforme, breast cancer, lung cancer, prostate cancer, or colorectal carcinoma.

[0161] As used herein, an “EGFR fusion molecule inhibitor” refers to a compound that interacts with an EGFR fusion molecule of the invention and modulates its activity and/or its expression. For example, the compound can decrease the activity or expression of an EGFR fusion molecule. The compound can be an antagonist of an EGFR fusion molecule (e.g., an EGFR fusion molecule inhibitor). Some non-limiting examples of EGFR fusion molecule inhibitors include peptides (such as peptide fragments comprising an EGFR fusion molecule, or antibodies or fragments thereof), small molecules, and nucleic acids (such as siRNA or antisense RNA specific for a nucleic acid comprising an EGFR fusion molecule). Antagonists of an EGFR fusion molecule decrease the amount or the duration of the activity of an EGFR fusion protein. In one embodiment, the fusion protein comprises a tyrosine kinase domain of an EGFR protein fused to a polypeptide that constitutively activates the tyrosine kinase domain of the EGFR protein (e.g., EGFR-SEPT (such as EFGR-SEPT14), EGFR-PSPH, or EGFR-CAND (such as EGFR-CAND1)). Antagonists include proteins, nucleic acids, antibodies, small molecules, or any other molecule which decrease the activity of an EGFR fusion molecule.

[0162] The term “modulate,” as it appears herein, refers to a change in the activity or expression of an EGFR fusion molecule. For example, modulation can cause a decrease in protein activity, binding characteristics, or any other biological, functional, or immunological properties of an EGFR fusion molecule, such as an EGFR fusion protein.

[0163] In one embodiment, an EGFR fusion molecule inhibitor can be a peptide fragment of an EGFR fusion protein that binds to the protein itself.

[0164] For example, the EGFR fusion polypeptide can encompass any portion of at least about 8 consecutive amino acids of SEQ ID NOS: 1, 3, 5, 7, 9, 11, 13, 16, or 8495. The fragment can comprise at least about 10 consecutive amino acids, at least about 20 consecutive amino acids, at least about 30 consecutive amino acids, at least about 40 consecutive amino acids, a least about 50 consecutive amino acids, at least about 60 consecutive amino acids, at least about 70 consecutive amino acids, at least about 75 consecutive amino acids, at least about 80 consecutive amino acids, at least about 85 consecutive amino acids, at least about 90 consecutive amino acids, at least about 95 consecutive amino acids, at least about 100 consecutive amino acids, at least about 200 consecutive amino acids, at least about 300 consecutive amino acids, at least about 400 consecutive amino acids, at least about 500 consecutive amino acids, at least about 600 consecutive amino acids, at least about 700 consecutive amino acids, or at least about 800 consecutive amino acids of SEQ ID NOS: 1, 3, 5, 7, 9, 11, 13, 16, or 8495. Fragments include all possible amino acid lengths between about 8 and 100 about amino acids, for example, lengths between about 10 and about 100 amino acids, between about 15 and about 100 amino acids, between about 20 and about 100 amino acids, between about 35 and about 100 amino acids, between about 40 and about 100 amino acids, between about 50 and about 100 amino acids, between about 70 and about 100 amino acids, between about 75 and about 100 amino acids, or between about 80 and about 100 amino acids. These peptide fragments can be obtained commercially or synthesized via liquid phase or solid phase synthesis methods (Atherton et al., (1989) Solid Phase Peptide Synthesis: a Practical Approach. IRL Press, Oxford, England). The EGFR fusion peptide fragments can be isolated from a natural source, genetically engineered, or chemically prepared. These methods are well known in the art.

[0165] An EGFR fusion molecule inhibitor can be a protein, such as an antibody (monoclonal, polyclonal, humanized, chimeric, or fully human), or a binding fragment thereof, directed against an EGFR fusion molecule. An antibody fragment can be a form of an antibody other than the full-length form and includes portions or components that exist within full-length antibodies, in addition to antibody fragments that have been engineered. Antibody fragments can include, but are not limited to, single chain Fv (scFv), diabodies, Fv, and (Fab′)₂, triabodies, Fc, Fab, CDR1, CDR2, CDR3, combinations of CDR's, variable regions, tetrabodies, bifunctional hybrid antibodies, framework regions, constant regions, and the like (see, Maynard et al., (2000) Ann. Rev. Biomed. Eng. 2:339-76; Hudson (1998) Curr. Opin. Biotechnol. 9:395-402). Antibodies can be obtained commercially, custom generated, or synthesized against an antigen of interest according to methods established in the art (see U.S. Pat. Nos. 6,914,128, 5,780,597, and 5,811,523; Roland E. Kontermann and Stefan Dübel (editors), Antibody Engineering, Vol. I & II, (2010) 2^{nd} ed., Springer; Antony S. Dimitrov (editor), Therapeutic Antibodies: Methods and Protocols (Methods in Molecular Biology), (2009), Humana Press; Benny Lo (editor) Antibody Engineering: Methods and Protocols (Methods in Molecular Biology), (2004) Humana Press, each of which are hereby incorporated by reference in their entireties). For example, antibodies directed to an EGFR fusion molecule can be obtained commercially from Abcam, Santa Cruz Biotechnology, Abgent, R&D Systems, Novus Biologicals, etc. Human antibodies directed to an EGFR fusion molecule (such as monoclonal, humanized, fully human, or chimeric antibodies) can be useful antibody therapeutics for use in humans. In one embodiment, an antibody or binding fragment thereof is directed against SEQ ID NOS: 1, 3, 5, 7, 9, 11, 13, 16, or 8495.

[0166] Inhibition of RNA encoding an EGFR fusion molecule can effectively modulate the expression of an EGFR fusion molecule. Inhibitors are selected from the group comprising: siRNA; interfering RNA or RNAi; dsRNA; RNA Polymerase III transcribed DNAs; ribozymes; and antisense nucleic acids, which can be RNA, DNA, or an artificial nucleic acid.

[0167] Antisense oligonucleotides, including antisense DNA, RNA, and DNA/RNA molecules, act to directly block the translation of mRNA by binding to targeted mRNA and preventing protein translation. For example, antisense oligonucleotides of at least about 15 bases and complementary to unique regions of the DNA sequence encoding an EGFR fusion molecule can be synthesized, e.g., by conventional phosphodiester techniques (Dallas et al., (2006) Med. Sci. Monit. 12(4):RA67-74; Kalota et al., (2006) Handb. Exp. Pharmacol. 173:173-96; Lutzelburger et al., (2006) Handb. Exp. Pharmacol. 173:243-59). Antisense nucleotide sequences include, but are not limited to: morpholinos, 2′-O-methyl polynucleotides, DNA, RNA and the like.

[0168] siRNA comprises a double stranded structure containing from about 15 to about 50 base pairs, for example from about 21 to about 25 base pairs, and having a nucleotide sequence identical or nearly identical to an expressed target gene or RNA within the cell. The siRNA comprise a sense RNA strand and a complementary antisense RNA strand annealed together by standard Watson-Crick base-pairing interactions. The sense strand comprises a nucleic acid sequence which is substantially identical to a nucleic acid sequence contained within the target miRNA molecule. “Substantially identical” to a target sequence contained within the target mRNA refers to a nucleic acid sequence that differs from the target sequence by about 3% or less. The sense and antisense strands of the siRNA can comprise two complementary, single-stranded RNA molecules, or can comprise a single molecule in which two complementary portions are base-paired and are covalently linked by a single-stranded “hairpin” area. See also, McMnaus and Sharp (2002) Nat Rev Genetics, 3:737-47, and Sen and Blau (2006) FASEB J., 20:1293-99, the entire disclosures of which are herein incorporated by reference.

[0169] The siRNA can be altered RNA that differs from naturally-occurring RNA by the addition, deletion, substitution and/or alteration of one or more nucleotides. Such alterations can include addition of non-nucleotide material, such as to the end(s) of the siRNA or to one or more internal nucleotides of the siRNA, or modifications that make the siRNA resistant to nuclease digestion, or the substitution of one or more nucleotides in the siRNA with deoxyribo-nucleotides. One or both strands of the siRNA can also comprise a 3′ overhang. As used herein, a 3′ overhang refers to at least one unpaired nucleotide extending from the 3′-end of a duplexed RNA strand. For example, the siRNA can comprise at least one 3′ overhang of from 1 to about 6 nucleotides (which includes ribonucleotides or deoxyribonucleotides) in length, or from 1 to about 5 nucleotides in length, or from 1 to about 4 nucleotides in length, or from about 2 to about 4 nucleotides in length. For example, each strand of the siRNA can comprise 3′ overhangs of dithymidylic acid (“TT”) or diuridylic acid (“uu”).

[0170] siRNA can be produced chemically or biologically, or can be expressed from a recombinant plasmid or viral vector (for example, see U.S. Pat. Nos. 7,294,504 and 7,422,896, the entire disclosures of which are herein incorporated by reference). Exemplary methods for producing and testing dsRNA or siRNA molecules are described in U.S. Patent Application Publication No. 2002/0173478 to Gewirtz, U.S. Pat. No. 8,071,559 to Hannon et al., and in U.S. Pat. No. 7,148,342 to Tolentino et al., the entire disclosures of which are herein incorporated by reference.

[0171] In one embodiment, an siRNA directed to a human nucleic acid sequence comprising an EGFR fusion molecule can be generated against any one of SEQ ID NOS: 2, 4, 8, 10, 14, or 15. In another embodiment, an siRNA directed to a human nucleic acid sequence comprising a breakpoint of an EGFR fusion molecule can be generated against any one of SEQ ID NOS: 4, 10, or 15.

[0172] RNA polymerase III transcribed DNAs contain promoters, such as the U6 promoter. These DNAs can be transcribed to produce small hairpin RNAs in the cell that can function as siRNA or linear RNAs, which can function as antisense RNA. The EGFR fusion molecule inhibitor can comprise ribonucleotides, deoxyribonucleotides, synthetic nucleotides, or any suitable combination such that the target RNA and/or gene is inhibited. In addition, these forms of nucleic acid can be single, double, triple, or quadruple stranded. (See for example Bass (2001) Nature, 411:428-429; Elbashir et al., (2001) Nature, 411:494 498; U.S. Pat. No. 6,509,154; U.S. Patent Application Publication No. 2003/0027783; and PCT Publication Nos. WO 00/044895, WO 99/032619, WO 00/01846, WO 01/029058, WO 00/044914).

[0173] EGFR fusion molecule inhibitor can be a small molecule that binds to an EGFR fusion protein described herein and disrupts its function. Small molecules are a diverse group of synthetic and natural substances generally having low molecular weights. They can be isolated from natural sources (for example, plants, fungi, microbes and the like), are obtained commercially and/or available as libraries or collections, or synthesized. Candidate small molecules that inhibit an EGFR fusion protein can be identified via in silico screening or high-through-put (HTP) screening of combinatorial libraries according to methods established in the art (e.g., see Potyrailo et al., (2011) ACS Comb Sci. 13(6):579-633; Mensch et al., (2009) J Pharm Sci. 98(12):4429-68; Schnur (2008) Curr Opin Drug Discov Devel. 11(3):375-80; and Jhoti (2007) Ernst Schering Found Symp Proc. (3):169-85, each of which are hereby incorporated by reference in their entireties.) Most conventional pharmaceuticals, such as aspirin, penicillin, and many chemotherapeutics, are small molecules, can be obtained commercially, can be chemically synthesized, or can be obtained from random or combinatorial libraries as described below (see, e.g., Werner et al., (2006) Brief Funct Genomic Proteomic 5(1):32-6).

[0174] Non-limiting examples of EGFR fusion molecule inhibitors include the EGFR inhibitors AZD4547 (see Gavine et al., (2012) Cancer Res, 72(8); 2045-56; see also PCT Application Publication No. WO2008/075068, each of which are hereby incorporated by reference in their entireties); NVP-BGJ398 (see Guagnano et al., (2011) J. Med. Chem., 54:7066-7083; see also U.S. Patent Application Publication No. 2008-0312248 A1, each of which are hereby incorporated by reference in their entireties); PD173074 (see Guagnano et al., (2011) J. Med. Chem., 54:7066-7083; see also Mohammadi et al., (1998) EMBO J., 17:5896-5904, each of which are hereby incorporated by reference in their entireties); NF449 (EMD Millipore (Billerica, MA) Cat. No. 480420; see also Krejci, (2010) the Journal of Biological Chemistry, 285(27):20644-20653, which is hereby incorporated by reference in its entirety); LY2874455 (Active Biochem; see Zhao et al. (2011) Mol Cancer Ther. (11):2200-10; see also PCT Application Publication No. WO 2010129509, each of which are hereby incorporated by reference in their entireties); TKI258 (Dovitinib); BIBF-1120 (Intedanib-Vargatef); BMS-582664 (Brivanib alaninate); AZD-2171 (Cediranib); TSU-68 (Orantinib); AB-1010 (Masitinib); AP-24534 (Ponatinib); and E-7080 (by Eisai). A non-limiting example of an EGFR fusion molecule inhibitor includes the inhibitor KHS101 (Wurdak et al., (2010) PNAS, 107(38): 16542-47, which is hereby incorporated by reference in its entirety).

[0175] Structures of EGFR fusion molecule inhibitors useful for the invention include, but are not limited to: the EGFR inhibitor AZD4547,

[chemical structure]

the EGFR inhibitor NVP-BGJ398,

[chemical structure]

the EGFR inhibitor PD173074,

[chemical structure]

the EGFR inhibitor LY2874455

[chemical structure]

and the EGFR inhibitor NF449 (EMD Millipore (Billerica, MA) Cat. No. 480420),

[chemical structure]

[0176] Other EGFR inhibitors include, but are not limited to:

[chemical structure]

[chemical structure]

[0177] A structure of an EGFR fusion molecule inhibitor useful for the invention includes, but is not limited to the inhibitor KHS101,

[chemical structure]

### Assessment and Therapeutic Treatment

[0178] The invention provides a method of decreasing the growth of a solid tumor in a subject. The tumor is associated with, but not limited to glioblastoma multiforme, breast cancer, lung cancer, prostate cancer, or colorectal carcinoma. In one embodiment, the method comprises detecting the presence of an EGFR fusion molecule in a sample obtained from a subject. In some embodiments, the sample is incubated with an agent that binds to an EFGR fusion molecule, such as an antibody, a probe, a nucleic acid primer, and the like. In further embodiments, the method comprises administering to the subject an effective amount of an EGFR fusion molecule inhibitor, wherein the inhibitor decreases the size of the solid tumor.

[0179] The invention also provides a method for treating or preventing a gene-fusion associated cancer in a subject, such as, but not limited to, glioblastoma multiforme, breast cancer, lung cancer, prostate cancer, or colorectal carcinoma. In one embodiment, the method comprises detecting the presence of an EGFR fusion molecule in a sample obtained from a subject, the presence of the fusion being indicative of a gene-fusion associated cancer, and, administering to the subject in need a therapeutic treatment against a gene-fusion associated cancer. In some embodiments, the sample is incubated with an agent that binds to an EFGR fusion molecule, such as an antibody, a probe, a nucleic acid primer, and the like.

[0180] The invention also provides a method for decreasing in a subject in need thereof the expression level or activity of a fusion protein comprising the tyrosine kinase domain of an EGFR protein fused to a polypeptide that constitutively activates the tyrosine kinase domain of the EGFR protein. In some embodiments, the method comprises obtaining a biological sample from the subject. In some embodiments, the sample is incubated with an agent that binds to an EGFR fusion molecule, such as an antibody, a probe, a nucleic acid primer, and the like. In some embodiments, the method comprises administering to the subject a therapeutic amount of a composition comprising an admixture of a pharmaceutically acceptable carrier an inhibitor of the fusion protein of the invention. In another embodiment, the method further comprises determining the fusion protein expression level or activity. In another embodiment, the method further comprises detecting whether the fusion protein expression level or activity is decreased as compared to the fusion protein expression level or activity prior to administration of the composition, thereby decreasing the expression level or activity of the fusion protein. In some embodiments, the fusion protein is an EGFR-PSPH fusion protein, an EGFR-CAND fusion protein, or an EGFR-SEPT fusion protein.

[0181] The administering step in each of the claimed methods can comprise a drug administration, such as EGFR fusion molecule inhibitor (for example, a pharmaceutical composition comprising an antibody that specifically binds to an EGFR-SEPT fusion protein, an EGFR-PSPH fusion protein, an EGFR-CAND fusion protein, or a fragment thereof; a small molecule that specifically binds to an EGFR protein; an antisense RNA or antisense DNA that decreases expression of an EGFR-SEPT fusion protein, an EGFR-PSPH fusion protein, an EGFR-CAND fusion; a siRNA that specifically targets an EGFR-SEPT fusion gene, an EGFR-PSPH fusion gene, or an EGFR-CAND). In one embodiment, the therapeutic molecule to be administered comprises a polypeptide of an EGFR fusion molecule, comprising at least about 75%, at least about 80%, at least about 85%, at least about 90%, at least about 93%, at least about 95%, at least about 97%, at least about 98%, at least about 99%, or 100% of the amino acid sequence of SEQ ID NOS: 1, 3, 5, 7, 9, 11, 13, 16, or 8495, and exhibits the function of decreasing expression of such a protein, thus treating a gene fusion-associated cancer. In another embodiment, administration of the therapeutic molecule decreases the size of the solid tumor associated with glioblastoma multiforme, breast cancer, lung cancer, prostate cancer, or colorectal carcinoma. In a further embodiment, administration of the therapeutic molecule decreases cell proliferation in a subject afflicted with a gene-fusion associated cancer.

[0182] In another embodiment, the therapeutic molecule to be administered comprises an siRNA directed to a human nucleic acid sequence comprising an EGFR fusion molecule. In one embodiment, the siRNA is directed to any one of SEQ ID NOS: 2, 4, 8, 10, 14, or 15. In a further embodiment, the therapeutic molecule to be administered comprises an antibody or binding fragment thereof, that is directed against SEQ ID NOS: 1, 3, 5, 7, 9, 11, 13, 16, or 8495. In some embodiments, the therapeutic molecule to be administered comprises a small molecule that specifically binds to an EGFR protein, such as AZD4547, NVP-BGJ398, PD173074, NF449, TK1258, BIBF-1120, BMS-582664, AZD-2171, TSU68, AB1010, AP24534, E-7080, or LY2874455.

[0183] An EGFR fusion molecule, for example, a fusion between EGFR and SEPT, PSPH, or CAND, can be determined at the level of the DNA, RNA, or polypeptide. Optionally, detection can be determined by performing an oligonucleotide ligation assay, a confirmation based assay, a hybridization assay, a sequencing assay, an allele-specific amplification assay, a microsequencing assay, a melting curve analysis, a denaturing high performance liquid chromatography (DHPLC) assay (for example, see Jones et al, (2000) Hum Genet., 106(6):663-8), or a combination thereof. In one embodiment, the detection is performed by sequencing all or part of an EGFR fusion molecule (e.g., EGFR-SEPT fusion (such as an EGFR-SEPT14 fusion), EGFR-CAND fusion (such as an EGFR-CAND1 fusion), EGFR-PSPH), or by selective hybridization or amplification of all or part of an EGFR fusion molecule (e.g., EGFR-SEPT fusion (such as an EGFR-SEPT14 fusion), EGFR-CAND fusion (such as an EGFR-CAND1 fusion), EGFR-PSPH)). AN EGFR fusion molecule specific amplification (e.g., EGFR-SEPT (such as an EGFR-SEPT14), EGFR-CAND (such as an EGFR-CAND1), EGFR-PSPH nucleic acid specific amplification) can be carried out before the fusion identification step.

[0184] The invention provides for a method of detecting a chromosomal alteration in a subject afflicted with a gene-fusion associated cancer. In some embodiments, the gene-fusion associated cancer comprises glioblastoma multiforme, breast cancer, lung cancer, prostate cancer, or colorectal carcinoma. In one embodiment, the chromosomal alteration is an in-frame fused transcript described herein, for example an EGFR fusion molecule. An alteration in a chromosome region occupied by an EGFR fusion molecule such as a nucleic acid encoding an EGFR-SEPT fusion (such as an EGFR-SEPT14 fusion), an EGFR-CAND fusion (such as an EGFR-CAND1 fusion), or an EGFR-PSPH, can be any form of mutation(s), deletion(s), rearrangement(s) and/or insertions in the coding and/or non-coding region of the locus, alone or in various combination(s). Mutations can include point mutations. Insertions can encompass the addition of one or several residues in a coding or non-coding portion of the gene locus. Insertions can comprise an addition of between 1 and 50 base pairs in the gene locus. Deletions can encompass any region of one, two or more residues in a coding or non-coding portion of the gene locus, such as from two residues up to the entire gene or locus. Deletions can affect smaller regions, such as domains (introns) or repeated sequences or fragments of less than about 50 consecutive base pairs, although larger deletions can occur as well. Rearrangement includes inversion of sequences. The alteration in a chromosome region occupied by an EGFR fusion molecule, e.g., a nucleic acid encoding a an EGFR-SEPT fusion (such as an EGFR-SEPT14 fusion), an EGFR-CAND fusion (such as an EGFR-CAND1 fusion), or an EGFR-PSPH, can result in amino acid substitutions, RNA splicing or processing, product instability, the creation of stop codons, production of oncogenic fusion proteins, frame-shift mutations, and/or truncated polypeptide production. The alteration can result in the production of an EGFR fusion molecule, for example, a nucleic acid encoding an EGFR-SEPT fusion (such as an EGFR-SEPT14 fusion), an EGFR-CAND fusion (such as an EGFR-CAND1 fusion), or an EGFR-PSPH fusion, with altered function, stability, targeting or structure. The alteration can also cause a reduction, or even an increase in protein expression. In one embodiment, the alteration in the chromosome region occupied by an EGFR fusion molecule can comprise a chromosomal rearrangement resulting in the production of an EGFR fusion molecule, such as an EGFR-SEPT fusion (such as an EGFR-SEPT14 fusion), an EGFR-CAND fusion (such as an EGFR-CAND1 fusion), or an EGFR-PSPH fusion. This alteration can be determined at the level of the DNA, RNA, or polypeptide. In another embodiment, the detection or determination comprises nucleic acid sequencing, selective hybridization, selective amplification, gene expression analysis, or a combination thereof. In another embodiment, the detection or determination comprises protein expression analysis, for example by western blot analysis, ELISA, or other antibody detection methods.

[0185] The present invention provides a method for treating a gene-fusion associated cancer in a subject in need thereof. In one embodiment, the method comprises obtaining a sample from the subject to determine the level of expression of an EGFR fusion molecule in the subject. In some embodiments, the sample is incubated with an agent that binds to an EGFR fusion molecule, such as an antibody, a probe, a nucleic acid primer, and the like. In another embodiment, the detection or determination comprises nucleic acid sequencing, selective hybridization, selective amplification, gene expression analysis, or a combination thereof. In another embodiment, the detection or determination comprises protein expression analysis, for example by western blot analysis, ELISA, or other antibody detection methods. In some embodiments, the method further comprises assessing whether to administer an EGFR fusion molecule inhibitor based on the expression pattern of the subject. In further embodiments, the method comprises administering an EGFR fusion molecule inhibitor to the subject. In one embodiment, the gene-fusion associated cancer comprises glioblastoma multiforme, breast cancer, lung cancer, prostate cancer, or colorectal carcinoma.

[0186] In one embodiment, the invention provides for a method of detecting the presence of altered RNA expression of an EFGR fusion molecule in a subject, for example, one afflicted with a gene-fusion associated cancer. In another embodiment, the invention provides for a method of detecting the presence of an EGFR fusion molecule in a subject. In some embodiments, the method comprises obtaining a sample from the subject to determine whether the subject expresses an EGFR fusion molecule. In some embodiments, the sample is incubated with an agent that binds to an EGFR fusion molecule, such as an antibody, a probe, a nucleic acid primer, and the like. In other embodiments, the detection or determination comprises nucleic acid sequencing, selective hybridization, selective amplification, gene expression analysis, or a combination thereof. In another embodiment, the detection or determination comprises protein expression analysis, for example by western blot analysis, ELISA, or other antibody detection methods. In some embodiments, the method further comprises assessing whether to administer an EGFR fusion molecule inhibitor based on the expression pattern of the subject. In further embodiments, the method comprises administering an EGFR fusion molecule inhibitor to the subject. Altered RNA expression includes the presence of an altered RNA sequence, the presence of an altered RNA splicing or processing, or the presence of an altered quantity of RNA. These can be detected by various techniques known in the art, including sequencing all or part of the RNA or by selective hybridization or selective amplification of all or part of the RNA.

[0187] In a further embodiment, the method can comprise detecting the presence or expression of an EGFR fusion molecule, such as a nucleic acid encoding an EGFR-SEPT fusion (such as an EGFR-SEPT14 fusion), an EGFR-CAND fusion (such as an EGFR-CAND1 fusion), or an EGFR-PSPH fusion. Altered polypeptide expression includes the presence of an altered polypeptide sequence, the presence of an altered quantity of polypeptide, or the presence of an altered tissue distribution. These can be detected by various techniques known in the art, including by sequencing and/or binding to specific ligands (such as antibodies). In one embodiment, the detecting comprises using a northern blot; real time PCR and primers directed to SEQ ID NOS: 2, 4, 8, 10, 14, or 15; a ribonuclease protection assay; a hybridization, amplification, or sequencing technique to detect an EGFR fusion molecule, such as one comprising SEQ ID NOS: 2, 4, 8, 10, 14, or 15; or a combination thereof. In another embodiment, the PCR primers comprise SEQ ID NOS 32, 33, 34, 35, 36, 37, 38, 39, 40, 41, 42, 43, 44, 45, 87, 88, or 89. In a further embodiment, primers used for the screening of EGFR fusion molecules, comprise SEQ ID NOS 32, 33, 34, 35, 36, 37, 38, 39, 40, 41, 42, 43, 44, 45, 87, 88, or 89. In some embodiments, primers used for genomic detection of an EGFR fusion comprise SEQ ID NOS 40, 41, 42, 43, 44, 45, or 89.

[0188] Various techniques known in the art can be used to detect or quantify altered gene or RNA expression or nucleic acid sequences, which include, but are not limited to, hybridization, sequencing, amplification, and/or binding to specific ligands (such as antibodies). Other suitable methods include allele-specific oligonucleotide (ASO), oligonucleotide ligation, allele-specific amplification, Southern blot (for DNAs), Northern blot (for RNAs), single-stranded conformation analysis (SSCA), PFGE, fluorescent in situ hybridization (FISH), gel migration, clamped denaturing gel electrophoresis, denaturing HLPC, melting curve analysis, heteroduplex analysis, RNase protection, chemical or enzymatic mismatch cleavage, ELISA, radio-immunoassays (RIA) and immuno-enzymatic assays (IEMA).

[0189] Some of these approaches (such as SSCA and constant gradient gel electrophoresis (CGGE)) are based on a change in electrophoretic mobility of the nucleic acids, as a result of the presence of an altered sequence. According to these techniques, the altered sequence is visualized by a shift in mobility on gels. The fragments can then be sequenced to confirm the alteration. Some other approaches are based on specific hybridization between nucleic acids from the subject and a probe specific for wild type or altered gene or RNA. The probe can be in suspension or immobilized on a substrate. The probe can be labeled to facilitate detection of hybrids. Some of these approaches are suited for assessing a polypeptide sequence or expression level, such as Northern blot, ELISA and RIA. These latter require the use of a ligand specific for the polypeptide, for example, the use of a specific antibody.

[0190] Hybridization. Hybridization detection methods are based on the formation of specific hybrids between complementary nucleic acid sequences that serve to detect nucleic acid sequence alteration(s). A detection technique involves the use of a nucleic acid probe specific for a wild type or altered gene or RNA, followed by the detection of the presence of a hybrid. The probe can be in suspension or immobilized on a substrate or support (for example, as in nucleic acid array or chips technologies). The probe can be labeled to facilitate detection of hybrids. In one embodiment, the probe according to the invention can comprise a nucleic acid directed to SEQ ID NOS: 2, 4, 8, 10, 14, or 15. For example, a sample from the subject can be contacted with a nucleic acid probe specific for a gene encoding an EGFR fusion molecule, and the formation of a hybrid can be subsequently assessed. In one embodiment, the method comprises contacting simultaneously the sample with a set of probes that are specific for an EGFR fusion molecule. Also, various samples from various subjects can be investigated in parallel.

[0191] According to the invention, a probe can be a polynucleotide sequence which is complementary to and specifically hybridizes with a, or a target portion of a, gene or RNA corresponding to an EGFR fusion molecule. Useful probes are those that are complementary to the gene, RNA, or target portion thereof. Probes can comprise single-stranded nucleic acids of between 8 to 1000 nucleotides in length, for instance between 10 and 800, between 15 and 700, or between 20 and 500. Longer probes can be used as well. A useful probe of the invention is a single stranded nucleic acid molecule of between 8 to 500 nucleotides in length, which can specifically hybridize to a region of a gene or RNA that corresponds to an EGFR fusion molecule.

[0192] The sequence of the probes can be derived from the sequences of the EGFR fusion genes provided herein. Nucleotide substitutions can be performed, as well as chemical modifications of the probe. Such chemical modifications can be accomplished to increase the stability of hybrids (e.g., intercalating groups) or to label the probe. Some examples of labels include, without limitation, radioactivity, fluorescence, luminescence, and enzymatic labeling.

[0193] A guide to the hybridization of nucleic acids is found in e.g., Sambrook, ed., Molecular Cloning: A Laboratory Manual (3^{rd} Ed.), Vols. 1-3, Cold Spring Harbor Laboratory, 1989; Current Protocols In Molecular Biology, Ausubel, ed. John Wiley & Sons, Inc., New York, 2001; Laboratory Techniques In Biochemistry And Molecular Biology: Hybridization With Nucleic Acid Probes, Part I. Theory and Nucleic Acid Preparation, Tijssen, ed. Elsevier, N.Y., 1993.

[0194] Sequencing. Sequencing can be carried out using techniques well known in the art, using automatic sequencers. The sequencing can be performed on the complete EGFR fusion molecule or on specific domains thereof.

[0195] Amplification. Amplification is based on the formation of specific hybrids between complementary nucleic acid sequences that serve to initiate nucleic acid reproduction. Amplification can be performed according to various techniques known in the art, such as by polymerase chain reaction (PCR), ligase chain reaction (LCR), strand displacement amplification (SDA) and nucleic acid sequence based amplification (NASBA). These techniques can be performed using commercially available reagents and protocols. Useful techniques in the art encompass real-time PCR, allele-specific PCR, or PCR based single-strand conformational polymorphism (SSCP). Amplification usually requires the use of specific nucleic acid primers, to initiate the reaction. For example, nucleic acid primers useful for amplifying sequences corresponding to an EGFR fusion molecule are able to specifically hybridize with a portion of the gene locus that flanks a target region of the locus. In one embodiment, amplification comprises using forward and reverse PCR primers directed to SEQ ID NOS: 2, 4, 8, 10, 14, or 15. Nucleic acid primers useful for amplifying sequences from an EGFR fusion molecule; the primers specifically hybridize with a portion of an EGFR fusion molecule. In certain subjects, the presence of an EGFR fusion molecule corresponds to a subject with a gene fusion-associated cancer. In one embodiment, amplification can comprise using forward and reverse PCR primers comprising nucleotide sequences of SEQ ID NOS: 32, 33, 34, 35, 36, 37, 38, 39, 40, 41, 42, 43, 44, 45, 87, 88, or 89.

[0196] Non-limiting amplification methods include, e.g., polymerase chain reaction, PCR (PCR Protocols, A Guide To Methods And Applications, ed. Innis, Academic Press, N.Y., 1990 and PCR Strategies, 1995, ed. Innis, Academic Press, Inc., N.Y.); ligase chain reaction (LCR) (Wu (1989) Genomics 4:560; Landegren (1988) Science 241:1077; Barringer (1990) Gene 89:117); transcription amplification (Kwoh (1989) PNAS 86:1173); and, self-sustained sequence replication (Guatelli (1990) PNAS 87:1874); Q Beta replicase amplification (Smith (1997) J. Clin. Microbiol. 35:1477-1491), automated Q-beta replicase amplification assay (Burg (1996) Mol. Cell. Probes 10:257-271) and other RNA polymerase mediated techniques (e.g., NASBA, Cangene, Mississauga, Ontario; see also Berger (1987) Methods Enzymol. 152:307-316; U.S. Pat. Nos. 4,683,195 and 4,683,202; and Sooknanan (1995) Biotechnology 13:563-564). All the references stated above are incorporated by reference in their entireties.

[0197] The invention provides for a nucleic acid primer, wherein the primer can be complementary to and hybridize specifically to a portion of an EGFR fusion molecule, such as a nucleic acid (e.g., DNA or RNA), in certain subjects having a gene fusion-associated cancer. In one embodiment, the gene-fusion associated cancer comprises glioblastoma multiforme, breast cancer, lung cancer, prostate cancer, or colorectal carcinoma. Primers of the invention can be specific for fusion sequences in a nucleic acid (DNA or RNA) encoding an EGFR-SEPT fusion (such as an EGFR-SEPT14 fusion), an EGFR-CAND fusion (such as an EGFR-CAND1 fusion), or an EGFR-PSPH fusion. By using such primers, the detection of an amplification product indicates the presence of a fusion of a nucleic acid encoding an EGFR-SEPT fusion (such as an EGFR-SEPT14 fusion), an EGFR-CAND fusion (such as an EGFR-CAND1 fusion), or an EGFR-PSPH fusion. Examples of primers of this invention can be single-stranded nucleic acid molecules of about 5 to 60 nucleotides in length, or about 8 to about 25 nucleotides in length. The sequence can be derived directly from the sequence of an EGFR fusion molecule, e.g. a nucleic acid encoding an EGFR-SEPT fusion (such as an EGFR-SEPT14 fusion), an EGFR-CAND fusion (such as an EGFR-CAND1 fusion), or an EGFR-PSPH fusion. Perfect complementarity is useful to ensure high specificity; however, certain mismatch can be tolerated. For example, a nucleic acid primer or a pair of nucleic acid primers as described above can be used in a method for detecting the presence of a gene fusion-associated cancer in a subject. In one embodiment, primers can be used to detect an EGFR fusion molecule, such as a primer comprising SEQ ID NOS: 32, 33, 34, 35, 36, 37, 38, 39, 40, 41, 42, 43, 44, 45, 87, 88, 89; or a combination thereof.

[0198] Specific Ligand Binding. As discussed herein, a nucleic acid encoding an EGFR fusion molecule or expression of an EGFR fusion molecule, can also be detected by screening for alteration(s) in a sequence or expression level of a polypeptide encoded by the same. Different types of ligands can be used, such as specific antibodies. In one embodiment, the sample is contacted with an antibody specific for a polypeptide encoded by an EGFR fusion molecule and the formation of an immune complex is subsequently determined. Various methods for detecting an immune complex can be used, such as ELISA, radioimmunoassays (RIA) and immuno-enzymatic assays (IEMA).

[0199] For example, an antibody can be a polyclonal antibody, a monoclonal antibody, as well as fragments or derivatives thereof having substantially the same antigen specificity. Fragments include Fab, Fab′2, or CDR regions. Derivatives include single-chain antibodies, humanized antibodies, or poly-functional antibodies. An antibody specific for a polypeptide encoded by an EGFR fusion molecule can be an antibody that selectively binds such a polypeptide. In one embodiment, the antibody is raised against a polypeptide encoded by an EGFR fusion molecule or an epitope-containing fragment thereof. Although non-specific binding towards other antigens can occur, binding to the target polypeptide occurs with a higher affinity and can be reliably discriminated from non-specific binding. In one embodiment, the method can comprise contacting a sample from the subject with an antibody specific for an EGFR fusion molecule, and determining the presence of an immune complex. Optionally, the sample can be contacted to a support coated with antibody specific for an EGFR fusion molecule. In one embodiment, the sample can be contacted simultaneously, or in parallel, or sequentially, with various antibodies specific for different forms of an EGFR fusion molecule, e.g., EGFR-SEPT fusion (such as an EGFR-SEPT14 fusion), an EGFR-CAND fusion (such as an EGFR-CAND1 fusion), or an EGFR-PSPH fusion.

[0200] The invention also provides for a diagnostic kit comprising products and reagents for detecting in a sample from a subject the presence of an EGFR fusion molecule. The kit can be useful for determining whether a sample from a subject exhibits reduced expression of an EGFR fusion molecule. For example, the diagnostic kit according to the present invention comprises any primer, any pair of primers, any nucleic acid probe and/or any ligand, or any antibody directed specifically to an EGFR fusion molecule. The diagnostic kit according to the present invention can further comprise reagents and/or protocols for performing a hybridization, amplification, or antigen-antibody immune reaction. In one embodiment, the kit can comprise nucleic acid primers that specifically hybridize to and can prime a polymerase reaction from an EGFR fusion molecule comprising SEQ ID NOS: 32, 33, 34, 35, 36, 37, 38, 39, 40, 41, 42, 43, 44, 45, 87, 88, 89, or a combination thereof. In one embodiment, primers can be used to detect an EGFR fusion molecule, such as a primer comprising SEQ ID NOS: 32, 33, 34, 35, 36, 37, 38, 39, 40, 41, 42, 43, 44, 45, 87, 88, 89; or a combination thereof. In a further embodiment, primers used for the screening of EGFR fusion molecules.

[0201] The diagnosis methods can be performed in vitro, ex vivo, or in vivo. These methods utilize a sample from the subject in order to assess the status of an EGFR fusion molecule. The sample can be any biological sample derived from a subject, which contains nucleic acids or polypeptides. Examples of such samples include, but are not limited to, fluids, tissues, cell samples, organs, and tissue biopsies. Non-limiting examples of samples include blood, liver, plasma, serum, saliva, urine, or seminal fluid. The sample can be collected according to conventional techniques and used directly for diagnosis or stored. The sample can be treated prior to performing the method, in order to render or improve availability of nucleic acids or polypeptides for testing. Treatments include, for instance, lysis (e.g., mechanical, physical, or chemical), centrifugation. The nucleic acids and/or polypeptides can be pre-purified or enriched by conventional techniques, and/or reduced in complexity. Nucleic acids and polypeptides can also be treated with enzymes or other chemical or physical treatments to produce fragments thereof. In one embodiment, the sample is contacted with reagents, such as probes, primers, or ligands, in order to assess the presence of an EGFR fusion molecule. Contacting can be performed in any suitable device, such as a plate, tube, well, or glass. In some embodiments, the contacting is performed on a substrate coated with the reagent, such as a nucleic acid array or a specific ligand array. The substrate can be a solid or semi-solid substrate such as any support comprising glass, plastic, nylon, paper, metal, or polymers. The substrate can be of various forms and sizes, such as a slide, a membrane, a bead, a column, or a gel. The contacting can be made under any condition suitable for a complex to be formed between the reagent and the nucleic acids or polypeptides of the sample.

### Nucleic Acid Delivery Methods

[0202] Delivery of nucleic acids into viable cells can be effected ex vivo, in situ, or in vivo by use of vectors, such as viral vectors (e.g., lentivirus, adenovirus, adeno-associated virus, or a retrovirus), or ex vivo by use of physical DNA transfer methods (e.g., liposomes or chemical treatments). Non-limiting techniques suitable for the transfer of nucleic acid into mammalian cells in vitro include the use of liposomes, electroporation, microinjection, cell fusion, DEAE-dextran, and the calcium phosphate precipitation method (See, for example, Anderson, Nature, 1998) supplement to 392(6679):250. Introduction of a nucleic acid or a gene encoding a polypeptide of the invention can also be accomplished with extrachromosomal substrates (transient expression) or artificial chromosomes (stable expression). Cells can also be cultured ex vivo in the presence of therapeutic compositions of the present invention in order to proliferate or to produce a desired effect on or activity in such cells. Treated cells can then be introduced in vivo for therapeutic purposes.

[0203] Nucleic acids can be inserted into vectors and used as gene therapy vectors. A number of viruses have been used as gene transfer vectors, including papovaviruses, e.g., SV40 (Madzak et al., (1992) J Gen Virol. 73(Pt 6):1533-6), adenovirus (Berkner (1992) Curr Top Microbiol Immunol. 158:39-66; Berkner (1988) Biotechniques, 6(7):616-29; Gorziglia and Kapikian (1992) J Virol. 66(7):4407-12; Quantin et al., (1992) Proc Natl Acad Sci USA. 89(7):2581-4; Rosenfeld et al., (1992) Cell. 68(1):143-55; Wilkinson et al., (1992) Nucleic Acids Res. 20(9):2233-9; Stratford-Perricaudet et al., (1990) Hum Gene Ther. 1(3):241-56), vaccinia virus (Moss (1992) Curr Opin Biotechnol. 3(5):518-22), adeno-associated virus (Muzyczka, (1992) Curr Top Microbiol Immunol. 158:97-129; Ohi et al., (1990) Gene. 89(2):279-82), herpesviruses including HSV and EBV (Margolskee (1992) Curr Top Microbiol Immunol. 158:67-95; Johnson et al., (1992) Brain Res Mol Brain Res. 12(1-3):95-102; Fink et al., (1992) Hum Gene Ther. 3(1):11-9; Breakefield and Geller (1987) Mol Neurobiol. 1(4):339-71; Freese et al., (1990) Biochem Pharmacol. 40(10):2189-99), and retroviruses of avian (Bandyopadhyay and Temin (1984) Mol Cell Biol. 4(4):749-54; Petropoulos et al., (1992) J Virol. 66(6):3391-7), murine (Miller et al. (1992) Mol Cell Biol. 12(7):3262-72; Miller et al., (1985) J Virol. 55(3):521-6; Sorge et al., (1984) Mol Cell Biol. 4(9):1730-7; Mann and Baltimore (1985) J Virol. 54(2):401-7; Miller et al., (1988) J Virol. 62(11):4337-45), and human origin (Shimada et al., (1991)J Clin Invest. 88(3):1043-7; Helseth et al., (1990) J Virol. 64(12):6314-8; Page et al., (1990) J Virol. 64(11):5270-6; Buchschacher and Panganiban (1992) J Virol. 66(5):2731-9).

[0204] Non-limiting examples of in vivo gene transfer techniques include transfection with viral (e.g., retroviral) vectors (see U.S. Pat. No. 5,252,479, which is incorporated by reference in its entirety) and viral coat protein-liposome mediated transfection (Dzau et al., (1993) Trends in Biotechnology 11:205-210), incorporated entirely by reference). For example, naked DNA vaccines are generally known in the art; see Brower, (1998) Nature Biotechnology, 16:1304-1305, which is incorporated by reference in its entirety. Gene therapy vectors can be delivered to a subject by, for example, intravenous injection, local administration (see, e.g., U.S. Pat. No. 5,328,470) or by stereotactic injection (see, e.g., Chen, et al., (1994) Proc. Natl. Acad. Sci. USA 91:3054-3057). The pharmaceutical preparation of the gene therapy vector can include the gene therapy vector in an acceptable diluent, or can comprise a slow release matrix in which the gene delivery vehicle is imbedded. Alternatively, where the complete gene delivery vector can be produced intact from recombinant cells, e.g., retroviral vectors, the pharmaceutical preparation can include one or more cells that produce the gene delivery system.

[0205] For reviews of nucleic acid delivery protocols and methods see Anderson et al. (1992) Science 256:808-813; U.S. Pat. Nos. 5,252,479, 5,747,469, 6,017,524, 6,143,290, 6,410,010 6,511,847; and U.S. Application Publication No. 2002/0077313, which are all hereby incorporated by reference in their entireties. For additional reviews, see Friedmann (1989) Science, 244:1275-1281; Verma, Scientific American: 68-84 (1990); Miller (1992) Nature, 357: 455-460; Kikuchi et al. (2008) J Dermatol Sci. 50(2):87-98; Isaka et al. (2007) Expert Opin Drug Deliv. 4(5):561-71; Jager et al. (2007) Curr Gene Ther. 7(4):272-83; Waehler et al. (2007) Nat Rev Genet. 8(8):573-87; Jensen et al. (2007) Ann Med. 39(2):108-15; Herweijer et al. (2007) Gene Ther. 14(2):99-107; Eliyahu et al. (2005) Molecules 10(1):34-64; and Altaras et al. (2005) Adv Biochem Eng Biotechnol. 99:193-260, all of which are hereby incorporated by reference in their entireties.

[0206] An EGFR fusion nucleic acid can also be delivered in a controlled release system. For example, the EGFR fusion molecule can be administered using intravenous infusion, an implantable osmotic pump, a transdermal patch, liposomes, or other modes of administration. In one embodiment, a pump can be used (see Sefton (1987) Biomed. Eng. 14:201; Buchwald et al. (1980) Surgery 88:507; Saudek et al. (1989) N. Engl. J. Med. 321:574). In another embodiment, polymeric materials can be used (see Medical Applications of Controlled Release, Langer and Wise (eds.), CRC Pres., Boca Raton, Fla. (1974); Controlled Drug Bioavailability, Drug Product Design and Performance, Smolen and Ball (eds.), Wiley, New York (1984); Ranger and Peppas, (1983) J. Macromol. Sci. Rev. Macromol. Chem. 23:61; see also Levy et al. (1985) Science 228:190; During et al. (1989) Ann. Neurol. 25:351; Howard et al. (1989) J. Neurosurg. 71:105). In yet another embodiment, a controlled release system can be placed in proximity of the therapeutic target thus requiring only a fraction of the systemic dose (see, e.g., Goodson, in Medical Applications of Controlled Release, supra, vol. 2, pp. 115-138 (1984)). Other controlled release systems are discussed in the review by Langer (Science (1990) 249:1527-1533).

### Pharmaceutical Compositions and Administration for Therapy

[0207] An inhibitor of the invention can be incorporated into pharmaceutical compositions suitable for administration, for example the inhibitor and a pharmaceutically acceptable carrier

[0208] AN EGFR fusion molecule or inhibitor of the invention can be administered to the subject once (e.g., as a single injection or deposition). Alternatively, an EGFR fusion molecule or inhibitor can be administered once or twice daily to a subject in need thereof for a period of from about two to about twenty-eight days, or from about seven to about ten days. AN EGFR fusion molecule or inhibitor can also be administered once or twice daily to a subject for a period of 1, 2, 3, 4, 5, 6, 7, 8, 9, 10, 11, 12 times per year, or a combination thereof. Furthermore, an EGFR fusion molecule or inhibitor of the invention can be co-administrated with another therapeutic. Where a dosage regimen comprises multiple administrations, the effective amount of the EGFR fusion molecule or inhibitor administered to the subject can comprise the total amount of gene product administered over the entire dosage regimen.

[0209] AN EGFR fusion molecule or inhibitor can be administered to a subject by any means suitable for delivering the EGFR fusion molecule or inhibitor to cells of the subject, such as cancer cells, e.g., glioblastoma multiforme, breast cancer, lung cancer, prostate cancer, or colorectal carcinoma. For example, an EGFR fusion molecule or inhibitor can be administered by methods suitable to transfect cells. Transfection methods for eukaryotic cells are well known in the art, and include direct injection of the nucleic acid into the nucleus or pronucleus of a cell; electroporation; liposome transfer or transfer mediated by lipophilic materials; receptor mediated nucleic acid delivery, bioballistic or particle acceleration; calcium phosphate precipitation, and transfection mediated by viral vectors.

[0210] The compositions of this invention can be formulated and administered to reduce the symptoms associated with a gene fusion-associated cancer, e.g., glioblastoma multiforme, breast cancer, lung cancer, prostate cancer, or colorectal carcinoma, by any means that produces contact of the active ingredient with the agent's site of action in the body of a subject, such as a human or animal (e.g., a dog, cat, or horse). They can be administered by any conventional means available for use in conjunction with pharmaceuticals, either as individual therapeutic active ingredients or in a combination of therapeutic active ingredients. They can be administered alone, but are generally administered with a pharmaceutical carrier selected on the basis of the chosen route of administration and standard pharmaceutical practice.

[0211] A therapeutically effective dose of EGFR fusion molecule or inhibitor can depend upon a number of factors known to those or ordinary skill in the art. The dose(s) of the EGFR fusion molecule inhibitor can vary, for example, depending upon the identity, size, and condition of the subject or sample being treated, further depending upon the route by which the composition is to be administered, if applicable, and the effect which the practitioner desires the an EGFR fusion molecule inhibitor to have upon the nucleic acid or polypeptide of the invention. These amounts can be readily determined by a skilled artisan. Any of the therapeutic applications described herein can be applied to any subject in need of such therapy, including, for example, a mammal such as a dog, a cat, a cow, a horse, a rabbit, a monkey, a pig, a sheep, a goat, or a human.

[0212] Pharmaceutical compositions for use in accordance with the invention can be formulated in conventional manner using one or more physiologically acceptable carriers or excipients. The therapeutic compositions of the invention can be formulated for a variety of routes of administration, including systemic and topical or localized administration. Techniques and formulations generally can be found in Remington's Pharmaceutical Sciences, Meade Publishing Co., Easton, Pa (20^{th} Ed., 2000), the entire disclosure of which is herein incorporated by reference. For systemic administration, an injection is useful, including intramuscular, intravenous, intraperitoneal, and subcutaneous. For injection, the therapeutic compositions of the invention can be formulated in liquid solutions, for example in physiologically compatible buffers such as Hank's solution or Ringer's solution. In addition, the therapeutic compositions can be formulated in solid form and redissolved or suspended immediately prior to use. Lyophilized forms are also included. Pharmaceutical compositions of the present invention are characterized as being at least sterile and pyrogen-free. These pharmaceutical formulations include formulations for human and veterinary use.

[0213] According to the invention, a pharmaceutically acceptable carrier can comprise any and all solvents, dispersion media, coatings, antibacterial and antifungal agents, isotonic and absorption delaying agents, and the like, compatible with pharmaceutical administration. The use of such media and agents for pharmaceutically active substances is well known in the art. Any conventional media or agent that is compatible with the active compound can be used. Supplementary active compounds can also be incorporated into the compositions.

[0214] A pharmaceutical composition containing EGFR fusion molecule inhibitor can be administered in conjunction with a pharmaceutically acceptable carrier, for any of the therapeutic effects discussed herein. Such pharmaceutical compositions can comprise, for example antibodies directed to an EGFR fusion molecule, or a variant thereof, or antagonists of an EGFR fusion molecule. The compositions can be administered alone or in combination with at least one other agent, such as a stabilizing compound, which can be administered in any sterile, biocompatible pharmaceutical carrier including, but not limited to, saline, buffered saline, dextrose, and water. The compositions can be administered to a patient alone, or in combination with other agents, drugs or hormones.

[0215] Sterile injectable solutions can be prepared by incorporating the EGFR fusion molecule inhibitor (e.g., a polypeptide or antibody) in the required amount in an appropriate solvent with one or a combination of ingredients enumerated herein, as required, followed by filtered sterilization. Generally, dispersions are prepared by incorporating the active compound into a sterile vehicle which contains a basic dispersion medium and the required other ingredients from those enumerated herein. In the case of sterile powders for the preparation of sterile injectable solutions, examples of useful preparation methods are vacuum drying and freeze-drying which yields a powder of the active ingredient plus any additional desired ingredient from a previously sterile-filtered solution thereof.

[0216] In some embodiments, the EGFR fusion molecule inhibitor can be applied via transdermal delivery systems, which slowly releases the active compound for percutaneous absorption. Permeation enhancers can be used to facilitate transdermal penetration of the active factors in the conditioned media. Transdermal patches are described in for example, U.S. Pat. Nos. 5,407,713; 5,352,456; 5,332,213; 5,336,168; 5,290,561; 5,254,346; 5,164,189; 5,163,899; 5,088,977; 5,087,240; 5,008,110; and 4,921,475.

[0217] “Subcutaneous” administration can refer to administration just beneath the skin (i.e., beneath the dermis). Generally, the subcutaneous tissue is a layer of fat and connective tissue that houses larger blood vessels and nerves. The size of this layer varies throughout the body and from person to person. The interface between the subcutaneous and muscle layers can be encompassed by subcutaneous administration. This mode of administration can be feasible where the subcutaneous layer is sufficiently thin so that the factors present in the compositions can migrate or diffuse from the locus of administration. Thus, where intradermal administration is utilized, the bolus of composition administered is localized proximate to the subcutaneous layer.

[0218] Administration of the cell aggregates (such as DP or DS aggregates) is not restricted to a single route, but can encompass administration by multiple routes. For instance, exemplary administrations by multiple routes include, among others, a combination of intradermal and intramuscular administration, or intradermal and subcutaneous administration. Multiple administrations can be sequential or concurrent. Other modes of application by multiple routes will be apparent to the skilled artisan.

[0219] In other embodiments, this implantation method will be a one-time treatment for some subjects. In further embodiments of the invention, multiple cell therapy implantations will be required. In some embodiments, the cells used for implantation will generally be subject-specific genetically engineered cells. In another embodiment, cells obtained from a different species or another individual of the same species can be used. Thus, using such cells can require administering an immunosuppressant to prevent rejection of the implanted cells. Such methods have also been described in U.S. Pat. No. 7,419,661 and PCT application publication WO 2001/32840, and are hereby incorporated by reference.

[0220] A pharmaceutical composition of the invention is formulated to be compatible with its intended route of administration. Examples of routes of administration include parenteral, e.g., intravenous, intradermal, subcutaneous, oral (e.g., inhalation or ingestion), transdermal (topical), transmucosal, and rectal administration. Solutions or suspensions used for parenteral, intradermal, or subcutaneous application can include the following components: a sterile diluent such as water for injection, saline solution, fixed oils, polyethylene glycols, glycerine, propylene glycol or other synthetic solvents; antibacterial agents such as benzyl alcohol or methyl parabens; antioxidants such as ascorbic acid or sodium bisulfite; chelating agents such as ethylenediaminetetraacetic acid; buffers such as acetates, citrates or phosphates and agents for the adjustment of tonicity such as sodium chloride or dextrose. pH can be adjusted with acids or bases, such as hydrochloric acid or sodium hydroxide. The parenteral preparation can be enclosed in ampoules, disposable syringes or multiple dose vials made of glass or plastic.

[0221] Pharmaceutical compositions suitable for injectable use include sterile aqueous solutions (where water soluble) or dispersions and sterile powders for the extemporaneous preparation of sterile injectable solutions or dispersions. For intravenous administration, suitable carriers include physiological saline, bacteriostatic water, or phosphate buffered saline (PBS). In all cases, the composition must be sterile and should be fluid to the extent that easy syringability exists. It must be stable under the conditions of manufacture and storage and must be preserved against the contaminating action of microorganisms such as bacteria and fungi. The carrier can be a solvent or dispersion medium containing, for example, water, ethanol, a pharmaceutically acceptable polyol like glycerol, propylene glycol, liquid polyetheylene glycol, and suitable mixtures thereof. The proper fluidity can be maintained, for example, by the use of a coating such as lecithin, by the maintenance of the required particle size in the case of dispersion and by the use of surfactants. Prevention of the action of microorganisms can be achieved by various antibacterial and antifungal agents, for example, parabens, chlorobutanol, phenol, ascorbic acid, thimerosal, and the like. In many cases, it can be useful to include isotonic agents, for example, sugars, polyalcohols such as mannitol, sorbitol, sodium chloride in the composition. Prolonged absorption of the injectable compositions can be brought about by including in the composition an agent which delays absorption, for example, aluminum monostearate and gelatin.

[0222] Sterile injectable solutions can be prepared by incorporating the inhibitor (e.g., a polypeptide or antibody or small molecule) of the invention in the required amount in an appropriate solvent with one or a combination of ingredients enumerated herein, as required, followed by filtered sterilization. Generally, dispersions are prepared by incorporating the active compound into a sterile vehicle which contains a basic dispersion medium and the required other ingredients from those enumerated herein. In the case of sterile powders for the preparation of sterile injectable solutions, examples of useful preparation methods are vacuum drying and freeze-drying which yields a powder of the active ingredient plus any additional desired ingredient from a previously sterile-filtered solution thereof.

[0223] Oral compositions generally include an inert diluent or an edible carrier. They can be enclosed in gelatin capsules or compressed into tablets. For the purpose of oral therapeutic administration, the active compound can be incorporated with excipients and used in the form of tablets, troches, or capsules. Oral compositions can also be prepared using a fluid carrier and subsequently swallowed.

[0224] Pharmaceutically compatible binding agents, and/or adjuvant materials can be included as part of the composition. The tablets, pills, capsules, troches and the like can contain any of the following ingredients, or compounds of a similar nature: a binder such as microcrystalline cellulose, gum tragacanth or gelatin; an excipient such as starch or lactose, a disintegrating agent such as alginic acid, Primogel, or corn starch; a lubricant such as magnesium stearate or sterotes; a glidant such as colloidal silicon dioxide; a sweetening agent such as sucrose or saccharin; or a flavoring agent such as peppermint, methyl salicylate, or orange flavoring.

[0225] Systemic administration can also be by transmucosal or transdermal means. For transmucosal or transdermal administration, penetrants appropriate to the barrier to be permeated are used in the formulation. Such penetrants are generally known in the art, and include, for example, for transmucosal administration, detergents, bile salts, and fusidic acid derivatives. Transmucosal administration can be accomplished through the use of nasal sprays or suppositories. For transdermal administration, the active compounds are formulated into ointments, salves, gels, or creams as generally known in the art.

[0226] In some embodiments, the effective amount of the administered EGFR fusion molecule inhibitor is at least about 0.0001 μg/kg body weight, at least about 0.00025 μg/kg body weight, at least about 0.0005 μg/kg body weight, at least about 0.00075 μg/kg body weight, at least about 0.001 μg/kg body weight, at least about 0.0025 μg/kg body weight, at least about 0.005 μg/kg body weight, at least about 0.0075 μg/kg body weight, at least about 0.01 μg/kg body weight, at least about 0.025 μg/kg body weight, at least about 0.05 μg/kg body weight, at least about 0.075 μg/kg body weight, at least about 0.1 μg/kg body weight, at least about 0.25 μg/kg body weight, at least about 0.5 μg/kg body weight, at least about 0.75 μg/kg body weight, at least about 1 μg/kg body weight, at least about 5 μg/kg body weight, at least about 10 μg/kg body weight, at least about 25 μg/kg body weight, at least about 50 μg/kg body weight, at least about 75 μg/kg body weight, at least about 100 μg/kg body weight, at least about 150 μg/kg body weight, at least about 200 μg/kg body weight, at least about 250 μg/kg body weight, at least about 300 μg/kg body weight, at least about 350 μg/kg body weight, at least about 400 μg/kg body weight, at least about 450 μg/kg body weight, at least about 500 μg/kg body weight, at least about 550 μg/kg body weight, at least about 600 μg/kg body weight, at least about 650 μg/kg body weight, at least about 700 μg/kg body weight, at least about 750 μg/kg body weight, at least about 800 μg/kg body weight, at least about 850 μg/kg body weight, at least about 900 μg/kg body weight, at least about 950 μg/kg body weight, at least about 1000 μg/kg body weight, at least about 2000 μg/kg body weight, at least about 3000 μg/kg body weight, at least about 4000 μg/kg body weight, at least about 5000 μg/kg body weight, at least about 6000 μg/kg body weight, at least about 7000 μg/kg body weight, at least about 8000 μg/kg body weight, at least about 9500 μg/kg body weight, or at least about 10,000 μg/kg body weight.

[0227] Unless otherwise defined, all technical and scientific terms used herein have the same meaning as commonly understood by one of ordinary skill in the art to which this invention belongs. Exemplary methods and materials are described below, although methods and materials similar or equivalent to those described herein can also be used in the practice or testing of the present invention.

[0228] All publications and other references mentioned herein are incorporated by reference in their entirety, as if each individual publication or reference were specifically and individually indicated to be incorporated by reference. Publications and references cited herein are not admitted to be prior art.

### EXAMPLES

[0229] Examples are provided below to facilitate a more complete understanding of the invention. The following examples illustrate the exemplary modes of making and practicing the invention. However, the scope of the invention is not limited to specific embodiments disclosed in these Examples, which are for purposes of illustration only, since alternative methods can be utilized to obtain similar results.

### Example 1: The Integrated Landscape of Driver Genomic Alterations in Glioblastoma

[0230] To address the challenge of driver mutations in glioblastoma (GBM) and uncover new driver genes in human GBM, a computational platform was developed that integrates the analysis of copy number variations and somatic mutations from a whole-exome dataset. The full spectrum of in-frame gene fusions was unveiled from a large transcriptome dataset of glioblastoma. The analyses revealed focal copy number variations and mutations in all the genes previously implicated in glioblastoma pathogenesis. Recurrent copy number variations and somatic mutations were detected in 18 genes not yet implicated in glioblastoma. For each of the new genes, the occurrence of focal and recurrent copy number changes in addition to somatic mutations underscores the relevance for glioblastoma pathogenesis. Without being bound by theory, mutations in LZTR-1, a Keltch-BTB-BACK-BTB-BACK adaptor of Cul3-containing E3 ligase complexes impacted ubiquitination of LZTR-1 substrates. Loss-of-function mutations of CTNND2 (coding for δ-catenin) targeted a neural-specific gene and were associated with the transformation of glioma cells along the mesenchymal lineage, a hallmark of aggressive glioblastoma. Reconstitution of δ-catenin in mesenchymal glioma cells reprogrammed them towards a neuronal cell fate. Recurrent translocations were also identified that fuse in-frame the coding sequence of EGFR to several partners in 7.6% of tumors, with EGFR-Septin-14 scoring as the most frequent functional gene fusion in human glioblastoma. EGFR fusions enhance proliferation and motility of glioma cells and confer sensitivity to EGFR inhibition in glioblastoma xenografts. These results provide important insights into the pathogenesis of glioblastoma and highlight new targets for therapeutic intervention.

[0231] Glioblastoma (GBM) is the most common primary intrinsic malignant brain tumor affecting ˜10,000 new patients each year with a median survival rate of only 12-15 months^{1,2}. Identifying and understanding the functional significance of the genetic alterations that drive initiation and progression of GBM is crucial to develop more effective therapies. Previous efforts in GBM genome characterization included array-based profiling of copy number changes, methylation and gene expression and targeted sequencing of candidate genes³⁻⁶. These studies identified somatic changes in well-known GBM genes (EGFR, PTEN, IDH1, TP53, NF1, etc.) and nominated putative cancer genes with somatic mutations, but the functional consequences of most alterations is unknown. The lack of strict correlation between somatic alterations and functionality in GBM is manifested by regions of large copy number variations (CNVs), in which the relevant gene(s) are masked within genomic domains encompassing many other genes. Furthermore, although the potential of next-generation sequencing of the whole coding exome is widely recognized for the nomination of new cancer genes, the elevated somatic mutation rate of GBM is a significant challenge for statistical approaches aimed to distinguish genes harboring driver from those with passenger mutations. A statistical approach was used to nominate driver genes in GBM from the integration of whole-exome sequencing data calling for somatic mutations with a CNVs analysis that prioritizes focality and magnitude of the genetic alterations.

[0232] Chromosomal rearrangements resulting in recurrent and oncogenic gene fusions are hallmarks of hematological malignancies and recently they have also been uncovered in solid tumors (breast, prostate, lung and colorectal carcinoma)^{7,8}. Recently, a small subset of GBM harbor FGFR-TACC gene fusions were provided indicating that the patients with FGFR-TACC-positive tumors would benefit from targeted EGFR kinase inhibition⁹. It remains unknown whether gene fusions involving other RTK-coding genes exist in GBM to create different oncogene addicting states. A large RNA-sequencing dataset of primary GBM and glioma stem cells (GSCs) was analyzed and the global landscape of in-frame gene fusions in human GBM was reported.

[0233] Nomination of Candidate GBM Genes

[0234] Focal CNVs and point mutations provide exquisite information on candidate driver genes by pinpointing their exact location. Without being bound by theory, the integration of somatic point mutations and focal CNV information in a single framework will nominate candidate genes implicated in GBM. MutComFocal is an algorithm designed for this purpose, in which driver genes are ranked by an integrated recurrence, focality and mutation score (see Methods). Overall, this strategy was applied to a cohort of 139 GBM and matched normal DNA analyzed by whole exome sequencing to identify somatic mutations and 469 GBM were analyzed by the Affymetrix SNP6.0 platform to identify CNVs.

[0235] The whole-exome analysis identified a mean of 43 protein-changing somatic mutations per tumor sample. The distribution of substitutions shows a higher rate of transitions vs tranversions (67%), with a strong preference for C->T and G->A (55%) (FIG. 6). As seen in other tumor types¹⁰, 19.2% of the mutations occurred in a CpG dinucleotide context (FIG. 7). Among somatic small nucleotide variants, the most frequently mutated genes have well-established roles in cancer, including GBM (TP53, EGFR, PTEN, and IDH1). In addition to known cancer genes, whole-exome sequencing identified several potentially new candidate driver genes mutated in ˜5% of tumor samples. To uncover the most likely driver genes of GBM initiation and/or progression, the mutation results were integrated with common focal genomic alterations, detected using an algorithm applied to high-density SNP arrays to generate MutComFocal scores. This analysis stratified somatically mutated genes into three groups: recurrently mutated genes without significant copy number alterations (Mut), mutated genes in regions of focal and recurrent amplifications (Amp-Mut) and mutated genes in regions of focal and recurrent deletions (Del-Mut). Employing this framework, a list of 67 genes was generated that score at the top of each of the three categories and that included nearly all the genes previously implicated in GBM. These genes, which are labeled in green in FIG. 1 include IDH1 (Mut, FIG. 1a), PIK3C2B, MDM4, MYCN, PIK3CA, PDGFRA, KIT, EGFR, and BRAF (Amp-Mut, FIG. 1B) and PIK3R1, PTEN, RB1, TP53, NF1 and ATRX (Del-Mut, FIG. 1c). Interestingly, the analysis also selected 52 new candidate driver genes previously unreported in GBM. Based upon their role in development and homeostasis of the CNS and their potential function in oncogenesis and tumor progression, 24 genes were selected for re-sequencing in an independent dataset of 35 GBM and matched normal controls. Eighteen genes were found somatically mutated by Sanger sequencing in the independent panel and are labeled in red in FIG. 1. Each of the validated new GBM genes is targeted by somatic mutations and CNVs in a cumulative fraction comprised between 2.9% and 45.7% of GBM (FIG. 9).

[0236] Among the commonly mutated and focally deleted genes that exhibited top MutComFocal scores and were validated in the independent GBM dataset, BCOR, LRP family members, HERC2, LZTR-1 and CTNND2. BCOR, a chromosome X-linked gene, encodes for a component of the nuclear co-repressor complex that is essential for normal development of the neuroectoderm and stem cell functions¹¹⁻¹³. BCOR mutations have recently been described in retinoblastoma and medulloblastoma, thus indicating that loss-of-function mutations in BCOR are common genetic events in neuroectodermal tumors^{14,15}. LRP1B is a member of the LDL receptor family and is among the most frequently mutated genes in human cancer (FIG. 1c)¹⁶. Interestingly, two other LDL receptor family members (LRP2 and LRP1) are mutated in 4.4% and 2.9% of tumors, respectively (FIG. 1a). The LRP proteins are highly expressed in the neuroepithelium and are essential for morphogenesis of the forebrain in mouse and humans^{17,18}. The tumor suppressor function of LRP proteins in GBM may be linked to their ability to promote chemosensitivity and control signaling through the Sonic hedgehog pathway, which is responsible for maintenance of cancer initiating cells in GBM¹⁹⁻²¹. The gene coding for the Hect ubiquitin ligase Herc2 is localized on chromosome 15q13 and is deleted and mutated in 15.1% and 2.2% of GBM cases, respectively. This gene has been implicated in severe neurodevelopmental syndromes. Moreover, protein substrates of Herc2 are crucial factors in genome stability and DNA damage-repair, two cell functions frequently disrupted in cancer^{22,23}.

[0237] Loss-of-Function Genetic Alterations Target the LZTR-1 and CTNND2 Genes in GBM

[0238] A gene that received one of the highest Del-Mut score by MutComFocal is LZTR-1 (FIG. 1c). The LZTR-1 coding region had non-synonymous mutations in 4.4% and the LZTR-1 locus (human chromosome 22q11) was deleted in 22.4% of GBM. LZTR-1, which is normally expressed in the human brain, codes for a protein with a characteristic Kelch-BTB-BACK-BTB-BACK domain architecture (FIGS. 8, 9). The LZTR-1 gene is highly conserved in the metazoans and was initially proposed to function as a transcriptional regulator, but follow-up studies have excluded a transcriptional role for this protein²⁴. Most proteins with BTB-BACK domains are substrate adaptors in Cullin3 (Cul3) ubiquitin ligase complexes, in which the BTB-BACK region binds to the N-terminal domain of Cul3, while a ligand binding domain, often a Kelch 6-bladed β-propeller motif, binds to substrates targeted for ubiquitination²⁵. To ask whether LZTR-1 directly binds Cul3, co-immunoprecipitation experiments were performed. FIG. 2a shows that Cul3 immunoprecipitates contain LZTR-1, thus indicating that LZTR-1 is an adaptor in Cul3 ubiquitin ligase complexes.

[0239] To address the potential function of LZTR-1 mutants, a homology model of LZTR-1 was built based in part on the crystal structures of the MATH-BTB-BACK protein SPOP²⁶, the BTB-BACK-Kelch proteins KLHL3 and KLHL11²⁷, and the Kelch domain of Keap1²⁸ (FIG. 2b). Without being bound by theory, the second BTB-BACK region of LZTR-1 binds Cul3 because of the presence of a ϕ-X-E motif in this BTB domain, followed by a 3-Box/BACK region (FIG. 9)²⁶. However, the preceding BTB-BACK region also participates in Cul3 binding. Four of the six LZTR-1 mutations identified in GBM are located within the Kelch domain and target highly conserved amino acids (FIG. 2b, c, FIG. 8). Interestingly, the concentration of LZTR-1 mutations in the Kelch domain reflects a similar pattern of mutations in the Kelch-coding region of the KLHL3 gene, recently identified in families with hypertension and electrolytic abnormalities^{29,30}. The R198G and G248R mutations localize to the b-c loop of the Kelch domain, in a region predicted to provide the substrate-binding surface of the domain²⁸. The W105R mutation targets a highly conserved anchor residue in the Kelch repeats and the T2881 mutation disrupts a buried residue that is conserved in LZTR-1 (FIG. 2b, FIG. 8). Both of these mutations are expected to perturb the folding of the Kelch domain. The remaining two mutations, located in the BTB-BACK domains are predicted to affect the interaction with Cul3 either by removing the entire BTB-BACK-BTB-BACK region (W437STOP) or by disrupting the folding of the last helical hairpin in the BTB-BACK domain (R810W, FIG. 2b). The pattern of mutations of LZTR-1 in GBM indicates that they impair binding either to specific substrates or to Cul3.

[0240] Among the top ranking genes in MutComFocal, CTNND2 is the gene expressed at the highest levels in the normal brain. CTNND2 codes for □-catenin, a member of the p120 subfamily of catenins that is expressed almost exclusively in the nervous system where it is crucial for neurite elongation, dendritic morphogenesis and synaptic plasticity³¹⁻³³. Germ-line hemizygous loss of CTNND2 severely impairs cognitive function and underlies some forms of mental retardation^{34,35}. CTNND2 shows a pronounced clustering of mutations in GBM. The observed spectrum of mutations includes four mutations located in the armadillo-coding domain and one in the region coding for the N-terminal coiled-coil domain (FIG. 10a). These regions are the two most relevant functional domains of δ-catenin and each of the mutations targets highly conserved residues with probably (K629Q, A776T, S881L, D999E) and possibly (A71T) damaging consequences³⁶. Together with focal genomic losses of CTNND2 (FIG. 10b), the mutation pattern indicates that CTNND2 is a tumor suppressor gene in GBM.

[0241] It was asked whether the expression of CTNND2 is down-regulated during oncogenic transformation in the CNS. Immunostaining experiments showed that δ-catenin is strongly expressed in the normal human and mouse brain with the highest expression in neurons (FIG. 3a, FIG. 10c). Conversely, the immunostaining analysis of 69 GBM revealed negligible or absent expression of δ-catenin in 21 cases (FIG. 3b). Oncogenic transformation in the CNS frequently results in loss of the default proneural cell fate in favor of an aberrant mesenchymal phenotype, which is associated with a very aggressive clinical outcome³⁷. The analysis of gene expression profiles of 498 GBM from the ATLAS-TCGA collection showed that low expression of CTNND2 is strongly enriched in tumors identified by a mesenchymal gene expression signature (T-test p-value=2.4 10⁻¹², FIG. 10d). Tumors with low CTNND2 expression were also characterized by poor clinical outcome and, among them tumors with copy number losses of the CTNND2 gene displayed the worst prognosis (FIG. 3c, d). Mesenchymal transformation of GBM, which is detected in the vast majority of established glioma cell lines, is associated with an apparently irreversible loss of the proneural cell fate and neuronal markers³⁷. Expression of δ-catenin in the U87 human glioma cell line reduced cell proliferation (FIG. 3e), decreased the expression of mesenchymal markers (FIG. 3f) and induced neuronal differentiation as shown by elongation of β3-tubulin-positive neurites and development of branched dendritic processes that stained positive for the post-synaptic marker PSD95 (FIG. 3g). Accordingly, δ-catenin decreased expression of cyclin A, a S-phase cyclin and up-regulated the Cdk inhibitor p27^{Kip1} and the neuronal-specific gene N-cadherin (FIG. 3h). Thus, restoring the normal expression of δ-catenin reprograms mesenchymal glioma cells towards the proneural lineage.

[0242] Recurrent EGFR Fusions in GBM

[0243] To identify gene fusions in GBM, RNA-seq data was analyzed from a total of 185 GBM samples (161 primary GBM plus 24 short-term cultures of glioma stem-like cells (GSCs) freshly isolated from patients carrying primary GBM). The analysis of the RNA-seq dataset led to the discovery of 92 candidate rearrangements that give rise to in-frame fusion transcripts (FIG. 27). Beside the previously reported FGFR3-TACC3 fusions events, the most frequent recurrent in-frame fusions involved EGFR in 7.6% of samples (14/185, 3.8%-11.3% CI). Nine of the 14 EGFR fusions included the recurrent partners SEPT14 (6/185, 3.2%) and PSPH (3/185, 1.6%) as the 3′ gene segment in the fusion. Two in-frame highly expressed fusions were also found involving the neurotrophic tyrosine kinase receptor 1 gene (NTRK1) as 3′ gene with two different 5′ partners (NFASC-NTRK1 and BCAN-NTRK1). Fusions with a similar structure involving NTRK1 are commonly found in papillary thyroid carcinomas³⁸. Using EXomeFuse, an algorithm for the reconstruction of genomic fusions from whole-exome data, EGFR-SEPT14 and NRTK1 fusions are the result of recurrent chromosomal translocations and reconstructed the corresponding genomic breakpoints (FIG. 27).

[0244] By sequencing the PCR products spanning the fusion breakpoint, each of the three types of recurrent in-frame fusion predictions (EGFR-SEPT14, EGFR-PSPH and NRTK1 fusions, FIG. 4, FIG. 11, and FIG. 12) were validated. In FIG. 4a, b the prediction and cDNA sequence validation are shown, respectively, for one of the tumors harboring an EGFR-SEPT14 fusion (TCGA-27-1837). The amplified cDNA contained an open reading frame for a protein of 1,041 amino acids resulting from the fusion of an EGFR amino-terminal portion of residues 1-982 with a SEPT14 carboxy-terminal portion of residues 373-432 (FIG. 4c). Thus, the structure of the EGFR-Septin14 fusion proteins involves EGFR at the N-terminus, providing a receptor tyrosine kinase domain fused to a coiled-coil domain from Septin14. Exon-specific gene expression analysis from the RNA-seq coverage in TCGA-27-1837 demonstrated that the EGFR and SEPT14 exons implicated in the fusion are highly overexpressed compared with the mRNA sequences not included in the fusion event (FIG. 13). Using PCR, the genomic breakpoint coordinates were mapped to chromosome 7 (#55,268,937 for EGFR and #55,870,909 for SEPT14, genome build GRCh37/hg19) falling within EGFR exon 25 and SEPT14 intron 9, which gives rise to a transcript in which the 5′ EGFR exon 24 is spliced to the 3′ SEPT14 exon 10 (FIG. 4d). Interestingly, the fused EGFR-PSPH cDNA and predicted fusion protein in the GBM sample TCGA-06-5408 involves the same EGFR N-terminal region implicated in the EGFR-SEPT14 with PSPH providing a carboxy-terminal portion of 35 amino acids (FIG. 11). An example of a fusion in which the EGFR-TK region is the 3′ partner is the CAND1-EGFR fusion in GSC-3316 (FIG. 14). Thus, either in the more frequent fusions in which EGFR is the 5′ partner or in those with EGFR as the 3′ gene, the region of the EGFR mRNA coding for the TK domain is invariably retained in each of the fusion transcripts (FIG. 27). RT-PCR and genomic PCR followed by Sanger sequencing from GBM TCGA-06-5411 were also used to successfully validate successfully the NFASC-NTRK1 fusions in which the predicted fusion protein includes the TK domain of the high-affinity NGF receptor (TrkA) fused downstream to the immunoglobulin-like region of the cell adhesion and ankyrin-binding region of neurofascin (FIG. 12).

[0245] To confirm that GBM harbor recurrent EGFR fusions and determine the frequency in an independent dataset, cDNA was screened from a panel of 248 GBMs and discovered 10 additional cases harboring EGFR-SEPT14 fusions (4%). Conversely, NFASC-NTRK1 fusions were not detected in this dataset. The frequency of EGFR-PSPH fusions was 2.2% (3/135).

[0246] The discovery of recurrent EGFR fusions in GBM is of particular interest. EGFR is activated in a significant fraction of primary GBM (˜25%) by an in-frame deletion of exons 2-7 (EGFRvIII)³⁹. To establish the functional relevance of EGFR fusions, it was determined whether the most frequent EGFR fusion in GBM (EGFR-SEPT14) provides an alternative mechanism of EGFR activation and confers sensitivity to EGFR inhibition. The EGFR-SEPT14 cDNA was cloned and prepared lentiviruses expressing EGFR-SEPT14, EGFRvIII or EGFR wild type. Transduction of the SNB19 glioma cell line (which lacks genomic alteration of EGFR) with the recombinant lentiviruses showed that cells expressing EGFR-SEPT14 or EGFRvIII proliferated at a rate that was 2-fold higher than control cells or cells expressing wild type EGFR (FIG. 5a). Furthermore, EGFR-SEPT14 and EGFRvIII markedly enhanced the ability of SNB19 cells to migrate in a wound assay (FIG. 5b, c). Finally it was investigated whether EGFR-SEPT14 fusions confer sensitivity to EGFR-TK activity in vivo. The analysis of a collection of 30 GBM xenografts directly established in the mouse from human GBM identified one xenograft model (D08-0537 MG) harboring the EGFR-SEPT14 fusion. The D08-0537 MG had been established from a heavily pretreated GBM. Treatment of D08-0537 MG tumors with two EGFR inhibitors showed that each of the two drugs significantly delayed the rate of tumor growth (FIG. 5d). Interestingly, lapatinib, an irreversible EGFR inhibitor recently proposed to target EGFR alterations in GBM⁴⁰, displayed the strongest anti-tumor effects (FIG. 5d, e). Conversely, EGFR inhibitors were ineffective against the GBM xenograft D08-0714 MG, which lacks genomic alterations of the EGFR gene (FIG. 5d, e). Taken together, these data determine that the EGFR-SEPT14 fusion confers a proliferative and migratory phenotype to glioma cells and imparts sensitivity to EGFR inhibition to human glioma harboring the fusion gene.

[0247] Discussion

[0248] A computational pipeline is described for the nomination of somatic cancer genes. This approach computes frequency, magnitude and focality of CNVs at any loci in the human genome with the somatic mutation rate for the genes residing at that genomic location. Thus, two of the genetic hallmarks of driver cancer genes (focality of copy number aberrations and point mutations) are integrated into a single score. The approach identifies marks of positive somatic selection in large unbiased cancer genome studies by efficiently removing the large burden of passenger mutations that characterize most human tumors and will be applicable to the dissection of the genomic landscape of other cancer types.

[0249] Besides recognizing nearly all the known genes reported to have functional relevance in GBM, our study discovered and validated somatic mutations in 18 new genes, which also harbor focal and recurrent CNVs in a significant fraction of GBM. For some of these genes, their importance extends beyond GBM, as underscored by cross-tumor relevance (e.g. BCOR), and protein family recurrence (e.g. LRP family members). For example, mutations of LZTR-1 have been reported in other tumors. In particular, mutations of the highly conserved residues in the Keltch domain (W105, G248, T288) and in the second BTB-BACK domain (R810) reported here are recurrent events in other tumor types⁴¹. Thus, understanding the nature of the substrates of LZTR-1-Cul3 ubiquitin ligase activity will provide important insights into the pathogenesis of multiple cancer types.

[0250] The identification of genetic and epigenetic loss-of-function alterations of the CTNND2 gene clustered in mesenchymal GBM provides a clue to the genetic events driving this aggressive GBM subtype. The important functions of δ-catenin for such crucial neuronal morphogenesis activities as the coordinated control of axonal and dendritic arborization indicates that full-blown mesenchymal transformation in the brain requires loss of the master regulators constraining cell determination in the CNS along the default neuronal lineage. The ability of δ-catenin to reprogram glioma cells that express mesenchymal genes towards a neuronal fate unravels an unexpected plasticity of mesenchymal GBM that might be exploited therapeutically.

[0251] In this study, the landscape of gene fusions is reported from a large dataset of GBM analyzed by RNA-Sequencing. In-frame gene fusions retaining the RTK-coding domain of EGFR emerged as the most frequent gene fusion events in GBM. In this tumor, EGFR is frequently targeted by focal amplications and our finding underscores the strong recombinogenic probability of focally amplified genes, as recently reported for the myc locus in medulloblastoma⁴². Resembling intragenic rearrangements that generate the EGFRvIII allele, EGFR-SEPT14 fusions enhance the proliferative and migratory capacity of glioma cells. They also confer sensitivity to EGFR inhibition to human GBM grown as mouse xenografts. These findings highlight the relevance of gene fusions implicating RTK-coding genes in the pathogenesis of GBM⁹. They also provide a strong rationale for the inclusion of GBM patients harboring EGFR fusions in clinical trials based on EGFR inhibitors.

[0252] Methods

[0253] 139 paired tumor-normal samples from TCGA were analyzed with the SAVI pipeline⁴³. The SAVI algorithm estimates frequencies of variant alleles in sample as well as the difference in allele frequency between paired samples. The algorithm establishes posterior high credibility intervals for those frequencies and differences of frequencies, which can be used for genotyping the samples on the one hand, and detecting somatic mutations in the case of tumor/normal pairs of samples on the other. The algorithm allows for random sequencing errors and uses the Phred scores of the sequenced alleles as an estimate of their reliability. To integrate point mutation and 469 GBM CNV data (Affymetrix SNP6.0), MutComFocal (see below) was used. The MutComFocal algorithm assigns a driver score to each gene through three different strategies that give priority to lesions, samples, and genes in which there is less uncertainty regarding potential tumorigenic drivers. First, the focality component of the score is inversely proportional to the size of the genomic lesion to which a gene belongs and thus prioritizes more focal genomic lesions. Second, the recurrence component of the MutComFocal score is inversely proportional to the total number of genes altered in a sample, which prioritizes samples with a smaller number of altered genes. Finally, the mutation component of the score is inversely proportional to the total number of genes mutated in a sample, which achieves the two-fold goal of prioritizing mutated genes on one hand, and samples with a smaller number of mutations on the other.

[0254] 161 RNA-Seq GBM tumor samples were also analyzed from TCGA plus 24 generated from our own dataset of GSCs. Nine of these samples previously reported in other studies were kept in the list to evaluate recurrence⁹. The samples were analyzed by means of the ChimeraScan algorithm in order to detect a list of gene fusion candidates⁴⁴. Using the Pegasus annotation pipeline (http://sourceforge.net/projects/pegasus-fus/), the fusion transcript was reconstructed, the reading frame was annotated and protein domains were detected that are either conserved or lost in the new chimeric event. The genomic breakpoint of recurrent gene fusion RNA transcripts was also probed for using whole-exome sequencing data (EXome-Fuse algorithm)⁹. The Kaplan-Meier survival analysis for CTNND2 CNV and CTNND2 expression were obtained using the REMBRANDT glioma dataset.

[0255] SAVI (Statistical Algorithm for Variant Frequency Identification):

[0256] The frequency of alleles in a sample was estimated by the SAVI pipeline, which constructs an empirical Bayesian prior for those frequencies, using data from the whole sample, and obtains a posterior distribution and high credibility intervals for each alleles^{S1}. The prior and posterior are distributed over a discrete set of frequencies with a precision of 1% and are connected by a modified binomial likelihood, which allows for some error rate. More precisely, a prior distribution p(f) of the frequency f and a prior for the error e uniform on the interval [0, E] was assumed for a fixed 0≤E≤1. The sequencing data at a particular allele is a random experiment producing a string of m (the total depth at the allele) bits with n “1”s (the variant depth at the allele). Assuming a binomial likelihood of the data and allowing for bits being misread due to random errors, the posterior probability P(f) of the frequency f is

$$P ( f ) = \frac{p ( f )}{C} \cdot \frac{1}{b - a} {{\int }_{f}}^{f + E - 2 Ef} {{x}^{n} ( 1 - x )}^{m - n} dx$$

[0257] where C is a normalization constant. For a particular allele, the value of E is determined by the quality of the nucleotides sequenced at that position as specified by their Phred scores. The SAVI pipeline takes as input the reads produced by the sequencing technology, filters out low quality reads and maps the rest onto a human reference genome. After mapping, a Bayesian prior for the distribution of allele frequencies for each sample is constructed by an iterative posterior update procedure, starting with a uniform prior. To genotype the sample, the posterior high credibility intervals were used for the frequency of the alleles at each genomic location. Alternatively, combining the Bayesian priors from different samples, posterior high credibility intervals were obtained for the difference between the samples of the frequencies of each allele. Finally, the statistically significant differences between the tumor and normal samples are reported as somatic variants. To estimate the positive prediction value of SAVI in the TCGA GBM samples, 41 mutations were selected for independent validation by Sanger sequencing. 39 of the 41 mutations were confirmed using Sanger sequencing, resulting in 0.95 (95% CI 0.83-0.99) validation rate.

[0258] Candidate genes were ranked by the number of somatic non-synonymous mutations. A robust fit of the ratio of non-synonymous to synonymous ratio was generated with a bisquare weighting function. Excess of non-synonymous alterations was estimated using a Poisson distribution with mean equal to the product of the ratio from the robust fit and the number of synonymous mutations. Genes in highly polymorphic genomic regions were filtered out based on an independent cohort of normal samples. The list of these regions includes families of genes known to generate false positives in somatic predictions (e.g. HLA, KRT and OR).

[0259] MutComFocal. Key cancer genes are often found amplified or deleted in chromosomal regions containing many other genes. Point mutations and gene fusions, on the other hand, provide more specific information about which genes may be implicated in the oncogenic process. MutComFocal, a Bayesian approach aiming to identify driver genes by integrating CNV and point mutation data was developed.

[0260] For a particular sample, let (c₁,N₁), . . . , (cₖ,Nₖ) describe the amplification lesions in that sample so that Nᵢ is the number of genes in the i-th lesion and cᵢ is its copy number change from normal. For a gene belonging to the i-th lesion the amplification recurrence sample score is defined as cᵢ/(Σⱼcⱼ·Nⱼ) and its amplification focality sample score is defined as (cᵢ/(Σⱼcⱼ)·(1/Nᵢ). To obtain the amplification recurrence and focality scores for a particular gene, the corresponding sample scores were summed over all samples and normalize the result so that each score sums to 1. The deletion and recurrence scores are defined in a similar manner. The mutation score is analogous to a recurrence score in which it was assumed that mutated genes belong to lesions with only one gene.

[0261] The amplification/mutation score is defined as the product of the two amplification scores and the mutation score while deletion/mutation score is defined as the product of the two deletion scores and the mutation score. The amplification/mutation and deletion/mutation scores are normalized to 1 and for each score, genes are divided into tiers iteratively, so that the top 2^{H} remaining genes are included in the next tier, where H is the entropy of the scores of the remaining genes normalized to 1. Based on their tier across the different types of scores, genes are assigned to being either deleted/mutated or amplified/mutated and genes in the top tiers are grouped into contiguous regions. The top genes in each region are considered manually and selected for further functional validation.

[0262] The recurrence and focality scores can be interpreted as the posterior probabilities that a gene is driving the selection of the disease, under two different priors for this: one global and one local in nature. The recurrence score is higher if a gene participates in many samples that do not have too many altered genes, while the focality score is higher if the gene participates in many focal lesions. Besides lending strong support to the inference of a gene as a potential driver, the directionality of the copy number alteration (amplification or deletion) informs us of the likely behavior of the candidate gene as an oncogene or tumor suppressor, respectively.

[0263] The genes displayed in FIG. 1 are selected based on the MutComFocal ranking (top 250 genes), the size of minimal region (less than 10 genes) and frequency of mutations (more than 2% for deletion/mutations and at least 1% in amplification/mutations).

[0264] RNA-Seq bioinformatics analysis. 161 RNA-Seq GBM tumor samples were analyzed from The Cancer Genome Atlas (TCGA), a public repository containing large-scale genome-sequencing of different cancers, plus 24 patients-derived GSCs. Nine of the GSCs samples reported in previous studies were kept in the list to evaluate recurrence^{S2}. The samples were analyzed by means of the ChimeraScan^{S3} algorithm in order to detect a list of gene fusion candidates. Briefly, ChimeraScan detects those reads that discordantly align to different transcripts of the same reference (split inserts). These reads provide an initial set of putative fusion candidates. Finally, the algorithm realigns the initially unmapped reads to the putative fusion candidates and detects those reads that align across the junction boundary (split reads). These reads provide the genomic coordinates of the breakpoint.

[0265] RNA-Seq analysis detected a total of 39,329 putative gene fusion events. In order to focus the experimental analysis on biologically relevant fused transcripts, Pegasus annotation pipeline (http://sourceforge.net/projects/pegasus-fus/) were applied. For each putative fusion, Pegasus reconstructs the entire fusion sequence on the base of genomic fusion breakpoint coordinates and gene annotations. Pegasus also annotates the reading frame of the resulting fusion sequences as either in-frame or frame-shift. Moreover, Pegasus detects the protein domains that are either conserved or lost in the new chimeric event by predicting the amino acid sequence and automatically querying the UniProt web service. On the basis of the Pegasus annotation report, relevant gene fusions were selected for further experimental validation according to the reading frame and the conserved/lost domains. The selected list (FIG. 27) was based on in-frame events expressed by ten or more reads and at least one read spanning the breaking point. To filter out candidate transplicing events, events with putative breakpoints at a distance of at least 25 kb were focused.

[0266] EXome-Fuse: Identification of Genetic Rearrangements using Whole-Exome Data. Although whole-exome sequencing data contains low intronic coverage that reduces the sensitivity for fusion discovery, it is readily available through the TCGA database. To characterize the genomic breakpoint of the chromosomal rearrangement, EXome-Fuse was designed: a gene fusion discovery pipeline particularly designed to analyze whole-exome data. For the samples harboring EGFR-SEPT14, EGFR-PSPH, NFASC-NTRK1, and BCAN-NTRK1 fusions in RNA, EXome-Fuse was applied to the corresponding whole-exome sequencing data deposited in TCGA. This algorithm can be divided into three stages: split insert identification, split read identification, and virtual reference alignment. Mapping against the human genome reference hg18 with BWA, all split inserts were first identified to compile a preliminary list of fusion candidates. This list was cut of any false positives produced from paralogous gene pairs using the Duplicated Genes Database and the EnsemblCompara GeneTrees⁴. Pseudogenes in the candidate list were annotated using the list from HUGO Gene Nomenclature Committee (HGNC) databases^{S5} and given lower priority. Candidates were also filtered out between homologous genes, as well as those with homologous or low-complexity regions around the breakpoint. For the remaining fusion candidates, any supporting split reads and their mates were probed using BLAST with a word size of 16, identity cutoff of 90%, and an expectation cutoff of 10⁻⁴. Finally, a virtual reference was created for each fusion transcript and all reads were re-align to calculate a final tally of split inserts and split reads such that all aligning read pairs maintain F-R directionality.

[0267] Targeted Exon Sequencing

[0268] All protein-coding exons for the 24 genes of interest were sequenced using genomic DNA extracted from frozen tumors and matched blood. 500 ng of DNA from each sample were sheared to an average of 150 bp in a Covaris instrument for 360 seconds (Duty cycle—10%; intensity—5; cycles/Burst—200). Barcoded libraries were prepared using the Kapa High-Throughput Library Preparation Kit Standard (Kapa Biosystems). Libraries were amplified using the KAPA HiFi Library Amplification kit (Kapa Biosystems) (8 cycles). Libraries were quantified using Qubit Fluorimetric Quantitation (Invitrogen) and the quality and size assessed using an Agilent Bioanalyzer. An equimolar pool of the 4 barcoded libraries (300 ng each) was created and 1,200 ng was input to exon capture using one reaction tube of the custom Nimblegen SeqCap EZ (Roche) with custom probes target the coding exons of the 38 genes. Capture by hybridization was performed according to the manufacturer's protocols with the following modifications: 1 nmol of a pool of blocker oligonucleotides (complementary to the barcoded adapters), and (B) post-capture PCR amplification was done using the KAPA HiFi Library Amplification kit instead of the Phusion High-Fidelity PCR Master Mix with HF Buffer Kit, in a 60 μl volume, since the Kapa HiFi kit greatly reduced or eliminated the bias against GC-rich regions. The pooled capture library was quantified by Qubit (Invitrogen) and Bioanalyzer (Agilent) and sequenced in on an Illumina MiSeq sequencer using the 2×150 paired-end cycle protocol. Reads were aligned to the hg19 build of the human genome using BWA with duplicate removal using samtools as implemented by Illumina MiSeq Reporter. Variant detection was performed using GATK UnifiedGenotyper. Somatic mutations were identified for paired samples using SomaticSniper and filtered for frequency of less than 3% in normal and over 3% in tumor samples. Variants were annotated with Charity annotator to identify protein-coding changes and cross-referenced against known dbSNP, 1000 Genomes, and COSMIC mutations. Sanger sequencing was used to confirm each mutation from normal and tumor DNA.

[0269] Modeling of LZTR-1

[0270] Structural templates for the Kelch and BTB-BACK regions of human LZTR-1 were identified with HHpred^{S6}. An initial 3D model was generated with the I-TASSER servers^{S7}. The Cul3 N-terminal domain was docked onto the model by superposing the KLHL3^{BTB-BACK}/Cul3^{NTD} crystal structure (PDB ID 4HXI, Xi and Privé PLOS ONE 2013) onto the second LZTR-1 BTB-BACK domain. The model does not include higher quaternary structure, although many BTB domains, and many Kelch domains, are known to self-associate^{S8}. The short linkage between the end of the first BACK domain and the beginning of the second BTB domain would appear to preclude an intrachain BTB-BTB pseudo-homodimer; without being bound by theory, LZTR-1 self-associates and forms higher order assemblies. Both BACK domains are the shorter, atypical form of the domain and consist of 2 helical hairpin motifs, as in SPOP^{S9,S10}, and not the 4-hairpin motif seen most BTB-BACK-Kelch proteins^{S10,S11}. The model from the Kelch domain predicts an unusual 1+3 velcro arrangement^{S12}, with the N-terminal region contributing strand d of blade 1 and the C-terminal region contributing strands a,b,c of the same blade, although an alternative 2+2 velcro model cannot be ruled out.

[0271] Cell Culture

[0272] SNB19 and U87 cells were cultured in DMEM supplemented with 10% Fetal Bovine Serum. Growth rate was determined by plating cells in six-well plates post 3 days after infection with the lentivirus indicated in Figure Legends. The number of viable cells was determined by trypan blue exclusion in triplicate cultures obtained from triplicate independent infections. Migration was evaluated by Confluent cells were scratched with a pipette tip and cultured in 0.25% FBS. After 16 h, images were taken using the Olympus IX70 connected to a digital camera. Images were processed using the ImageJ64 software. The area of the cell-free wound was assessed in triplicate samples. Experiments were repeated twice.

[0273] Immunofluorescence and Western Blot

[0274] immunoflurescence staining on brain tumor tissue microarrays were performed as previously described^{S17}. Immunofluorescence microscopy was performed on cells fixed with 4% para-formaldehyde (PFA) in phosphate buffer. Cells were permeabilized using 0.2% Triton X 100. Antibodies and concentrations used in immunofluorescence staining are:

| | | | |
|---|---|---|---|
| B-III Tubulin | Mouse | 1:400 | Promega |
| Catenin D2 | Guinea Pig | 1:500 | Acris |
| Fibronectin | Mouse | 1:1,000 | BD-Pharmingen |
| PSD-95 | Rabbit | 1:500 | Invitrogen |

[0275] Secondary antibodies conjugated to Alexa Fluor 594 (Molecular Probes) were used. DNA was stained by DAPI (Sigma). Fluorescence microscopy was performed on a Nikon A1R MP microscope.

[0276] Western blot analysis of U87 cells transduced with pLOC-GFP or pLOC CTNND2 was performed using the following antibodies:

| | | | |
|---|---|---|---|
| Anti-Vinculin | Mouse | 1:400 | SIGMA |
| Anti-N-Cadherin | Mouse | 1:200 | BD-Pharmingen |
| Cyclin A | Rabbit | 1:500 | Santa Cruz |
| P27 | Mouse | 1:250 | BD Transduction |

[0277] Cloning and Lentiviral Production

[0278] The lentiviral expression vector, pLOC-GFP and pLOC-LZTR1 were purchased from Open Biosystems. The full length EGFR-SEPT14 cDNA was amplified from tumor sample TCGA-27-1837. Primers used were: EGFR FW: 5′-agcgATGCGACCCTCCGGGA-3′ (SEQ ID NO: 30) and SEPT14 REV: 5′-TCTTACGATGTTTGTCTTTCTTTGT (SEQ ID NO: 31); EGFR wild type, EGFR Viii and EGFR-SEPT14 cDNAs were cloned into pLoc and lentiviral particles were produced using published protocols^{S13-S15}.

[0279] Genomic and mRNA RT-PCR

[0280] Total RNA was extracted from cells by using RNeasy Mini Kit (QIAGEN), following the manufacturer instructions. 500 ng of total RNA was retro-transcribed by using the Superscript III kit (Invitrogen), following the manufacturer instructions. The cDNAs obtained after the retro-transcription was used as templates for qPCR as described^{S13,S15}. The reaction was performed with a Roche480 thermal cycler, using the Absolute Blue QPCR SYBR Green Mix from Thermo Scientific. The relative amount of specific mRNA was normalized to GAPDH. Results are presented as the mean±SD of triplicate amplifications. The validation of fusion transcripts was performed using both genomic and RT-PCR with forward and reverse primer combinations designed within the margins of the paired-end read sequences detected by RNA-seq. Expressed fusion transcript variants were subjected to direct sequencing to confirm sequence and translation frame. Primers used for the screening of gene fusions are:

hEGFR-RT-FW1:
(SEQ ID NO: 32)
5′- GGGTGACTGTTTGGGAGTTGATG -3′;
hSEP14-RT-REV1:
(SEQ ID NO: 33)
5′- TGTTTGTCTTTCTTTGTATCGGTGC-3′;
hEGFR-RT-FW1:
(SEQ ID NO: 34)
5′- GTGATGTCTGGAGCTACGGG-3′;
hPSPH-RT-REV1:
(SEQ ID NO: 35)
5′- TGCCTGATCACATTTCCTCCA-3′;
hNFASC-RT-FW1:
(SEQ ID NO: 36)
5′- AGTTCCGTGTCATTGCCATCAAC-3′;
hNTRK1-RT-REV1:
(SEQ ID NO: 37)
5′- TGTTTCGTCCTTCTTCTCCACCG-3′;
hCAND1-RT-FW1:
(SEQ ID NO: 38)
5′- GGAAAAAATGACATCCAGCGAC-3′;
hEGFR-RT-REV1:
(SEQ ID NO: 39)
5′- TGGGTGTAAGAGGCTCCACAAG-3′.

[0281] Primers used for genomic detection of gene fusions are:

genomic EGFR-FW1:
(SEQ ID NO: 40)
5′- GGATGATAGACGCAGATAGTCGCC-3′;
genomic SEPT14-REV1:
(SEQ ID NO: 41)
5′- TCCAGTTGTTTTTTCTCTTCCTCG-3′;
genomic NFASC-FW1:
(SEQ ID NO: 42)
5′- AAGGGAGAGGGGACCAGAAAGAAC -3′;
genomic NTRK1-REV1:
(SEQ ID NO: 43)
5′- GAAAGGAAGAGGCAGGCAAAGAC -3′;
genomic CAND1-FW1:
(SEQ ID NO: 44)
5′- GCAATAGCAAAACAGGAAGATGTC-3′;
genomic EGFR-REV1:
(SEQ ID NO: 45)
5′- GAACACTTACCCATTCGTTGG-3′.

[0282] Subcutaneous Xenografts and Drug Treatment

[0283] Female athymic mice (nu/nu genotype, Balb/c background, 6 to 8 weeks old) were used for all antitumor studies. Patient-derived adult human glioblastoma xenografts were maintained. Xenografts were excised from host mice under sterile conditions, homogenized with the use of a tissue press/modified tissue cytosieve (Biowhitter Inc, Walkersville, MD) and tumor homogenate was loaded into a repeating Hamilton syringe (Hamilton, Co., Reno, NV) dispenser. Cells were injected sub-cutaneously into the right flank of the athymic mouse at an inoculation volume of 50 μl with a 19-gauge needle^{S16}. Subcutaneous tumors were measured twice weekly with hand-held vernier calipers (Scientific Products, McGraw, IL). Tumor volumes, V were calculated with the following formula: [(width)²×(length)]/2=V (mm³). For the sub-cutaneously tumor studies, groups of mice randomly selected by tumor volume were treated with EGFR kinase inhibitors when the median tumor volumes were on average 150 mm³ and were compared with control animals receiving vehicle (saline). Erlotinib was administered at 100 mg/Kg orally daily for 10 days. Lapatinib was administered at 75 mg/Kg orally twice per day for 20 days. Response to treatment was assessed by delay in tumor growth and tumor regression. Growth delay, expressed as T-C, is defined as the difference in days between the median time required for tumors in treated and control animals to reach a volume five times greater than that measured at the start of the treatment. Tumor regression is defined as a decrease in tumor volume over two successive measurements. Statistical analysis was performed using a SAS statistical analysis program, the Wilcoxon rank order test for growth delay, and Fisher's exact test for tumor regression as previously described.

### REFERENCES

[0284] 1 Porter, K. R., McCarthy, B. J., Freels, S., Kim, Y. & Davis, F. G. Prevalence estimates for primary brain tumors in the United States by age, gender, behavior, and histology. Neuro-oncology 12, 520-527, doi:10.1093/neuonc/nop066 (2010).
[0285] 2 Stupp, R. et al. Radiotherapy plus concomitant and adjuvant temozolomide for glioblastoma. The New England journal of medicine 352, 987-996, doi:10.1056/NEJMoa043330 (2005).
[0286] 3 Cancer Genome Atlas Research, N. Comprehensive genomic characterization defines human glioblastoma genes and core pathways. Nature 455, 1061-1068, doi:10.1038/nature07385 (2008).
[0287] 4 Noushmehr, H. et al. Identification of a CpG island methylator phenotype that defines a distinct subgroup of glioma. Cancer Cell 17, 510-522, doi:10.1016/j.ccr.2010.03.017 (2010).
[0288] 5 Parsons, D. W. et al. An integrated genomic analysis of human glioblastoma multiforme. Science 321, 1807-1812, doi:10.1126/science.1164382 (2008).
[0289] 6 Verhaak, R. G. et al. Integrated genomic analysis identifies clinically relevant subtypes of glioblastoma characterized by abnormalities in PDGFRA, IDH1, EGFR, and NF1 Cancer Cell 17, 98-110, doi:10.1016/j.ccr.2009.12.020 (2010).
[0290] 7 Bass, A. J. et al. Genomic sequencing of colorectal adenocarcinomas identifies a recurrent VTI1A-TCF7L2 fusion. Nat Genet 43, 964-968, doi:10.1038/ng.936 (2011).
[0291] 8 Chinnaiyan, A. M. & Palanisamy, N. Chromosomal aberrations in solid tumors. Prog Mol Biol Transl Sci 95, 55-94, doi:10.1016/B978-0-12-385071-3.00004-6 (2010).
[0292] 9 Singh, D. et al. Transforming fusions of FGFR and TACC genes in human glioblastoma. Science 337, 1231-1235, doi:10.1126/science.1220834 (2012).
[0293] 10 Rubin, A. F. & Green, P. Mutation patterns in cancer genomes. Proc Natl Acad Sci USA 106, 21766-21770, doi:10.1073/pnas.0912499106 (2009).
[0294] 11 Fan, Z. et al. BCOR regulates mesenchymal stem cell function by epigenetic mechanisms. Nat Cell Biol 11, 1002-1009, doi:10.1038/ncb1913 (2009).
[0295] 12 Wamstad, J. A. & Bardwell, V. J. Characterization of Bcor expression in mouse development. Gene Expr Patterns 7, 550-557, doi:10.1016/j.modgep.2007.01.006 (2007).
[0296] 13 Wamstad, J. A., Corcoran, C. M., Keating, A. M. & Bardwell, V. J. Role of the transcriptional corepressor Bcor in embryonic stem cell differentiation and early embryonic development. PLoS One 3, e2814, doi:10.1371/journal.pone.0002814 (2008).
[0297] 14 Pugh, T. J. et al. Medulloblastoma exome sequencing uncovers subtype-specific somatic mutations. Nature 488, 106-110, doi:10.1038/nature11329 (2012).
[0298] 15 Zhang, J. et al. A novel retinoblastoma therapy from genomic and epigenetic analyses. Nature 481, 329-334, doi:10.1038/nature10733 (2012).
[0299] 16 Beroukhim, R. et al. The landscape of somatic copy-number alteration across human cancers. Nature 463, 899-905, doi:10.1038/nature08822 (2010).
[0300] 17 Kantarci, S. et al. Mutations in LRP2, which encodes the multiligand receptor megalin, cause Donnai-Barrow and facio-oculo-acoustico-renal syndromes. Nat Genet 39, 957-959, doi:10.1038/ng2063 (2007).
[0301] 18 Willnow, T. E. et al. Defective forebrain development in mice lacking gp330/megalin. Proc Natl Acad Sci USA 93, 8460-8464 (1996).
[0302] 19 Christ, A. et al. LRP2 is an auxiliary SHH receptor required to condition the forebrain ventral midline for inductive signals. Dev Cell 22, 268-278, doi:10.1016/j.devcel.2011.11.023 (2012).
[0303] 20 Cowin, P. A. et al. LRP1B deletion in high-grade serous ovarian cancers is associated with acquired chemotherapy resistance to liposomal doxorubicin. Cancer Res 72, 4060-4073, doi:10.1158/0008-5472.CAN-12-0203 (2012).
[0304] 21 Lima, F. R. et al. Glioblastoma: therapeutic challenges, what lies ahead. Biochim Biophys Acta 1826, 338-349, doi: 10.1016/j.bbcan.2012.05.004 (2012).
[0305] 22 Bekker-Jensen, S. et al. HERC2 coordinates ubiquitin-dependent assembly of DNA repair factors on damaged chromosomes. Nat Cell Biol 12, 80-86; sup pp 81-12, doi:10.1038/ncb2008 (2010).
[0306] 23 Harlalka, G. V. et al. Mutation of HERC2 causes developmental delay with Angelman-like features. J Med Genet 50, 65-73, doi:10.1136/jmedgenet-2012-101367 (2013).
[0307] 24 Nacak, T. G., Leptien, K., Fellner, D., Augustin, H. G. & Kroll, J. The BTB-kelch protein LZTR-1 is a novel Golgi protein that is degraded upon induction of apoptosis. J Biol Chem 281, 5065-5071, doi:10.1074/jbc.M509073200 (2006).
[0308] 25 Stogios, P. J., Downs, G. S., Jauhal, J. J., Nandra, S. K. & Prive, G. G. Sequence and structural analysis of BTB domain proteins. Genome Biol 6, R82, doi:10.1186/gb-2005-6-10-r82 (2005).
[0309] 26 Errington, W. J. et al. Adaptor protein self-assembly drives the control of a cullin-RING ubiquitin ligase. Structure 20, 1141-1153, doi:10.1016/j.str.2012.04.009 (2012).
[0310] 27 Canning, P. et al. Structural basis for Cul3 assembly with the BTB-Kelch family of E3 ubiquitin ligases. J Biol Chem, doi:10.1074/jbc.M112.437996 (2013).
[0311] 28 Lo, S. C., Li, X., Henzl, M. T., Beamer, L. J. & Hannink, M. Structure of the Keap1:Nrf2 interface provides mechanistic insight into Nrf2 signaling. EMBO J 25, 3605-3617, doi:10.1038/sj.emboj.7601243 (2006).
[0312] 29 Boyden, L. M. et al. Mutations in kelch-like 3 and cullin 3 cause hypertension and electrolyte abnormalities. Nature 482, 98-102, doi:10.1038/nature10814 (2012).
[0313] 30 Louis-Dit-Picard, H. et al. KLHL3 mutations cause familial hyperkalemic hypertension by impairing ion transport in the distal nephron. Nat Genet 44, 456-460, S451-453, doi:10.1038/ng.2218 (2012).
[0314] 31 Abu-Elneel, K. et al. A delta-catenin signaling pathway leading to dendritic protrusions. J Biol Chem 283, 32781-32791, doi:10.1074/jbc.M804688200 (2008).
[0315] 32 Arikkath, J. et al. Delta-catenin regulates spine and synapse morphogenesis and function in hippocampal neurons during development. J Neurosci 29, 5435-5442, doi:10.1523/JNEUROSCI.0835-09.2009 (2009).
[0316] 33 Kosik, K. S., Donahue, C. P., Israely, I., Liu, X. & Ochiishi, T. Delta-catenin at the synaptic-adherens junction. Trends Cell Biol 15, 172-178, doi:10.1016/j.tcb.2005.01.004 (2005).
[0317] 34 Israely, I. et al. Deletion of the neuron-specific protein delta-catenin leads to severe cognitive and synaptic dysfunction. Curr Biol 14, 1657-1663, doi:10.1016/j.cub.2004.08.065 (2004).
[0318] 35 Jun, G. et al. delta-Catenin is genetically and biologically associated with cortical cataract and future Alzheimer-related structural and functional brain changes. PLoS One 7, e43728, doi:10.1371/journal.pone.0043728 (2012).
[0319] 36 Hicks, S., Wheeler, D. A., Plon, S. E. & Kimmel, M. Prediction of missense mutation functionality depends on both the algorithm and sequence alignment employed. Hum Mutat 32, 661-668, doi:10.1002/humu.21490 (2011).
[0320] 37 Phillips, H. S. et al. Molecular subclasses of high-grade glioma predict prognosis, delineate a pattern of disease progression, and resemble stages in neurogenesis. Cancer Cell 9, 157-173, doi:10.1016/j.ccr.2006.02.019 (2006).
[0321] 38 Pierotti, M. A. & Greco, A. Oncogenic rearrangements of the NTRK1/NGF receptor. Cancer Lett 232, 90-98, doi:10.1016/j.canlet.2005.07.043 (2006).
[0322] 39 Dunn, G. P. et al. Emerging insights into the molecular and cellular basis of glioblastoma. Genes Dev 26, 756-784, doi:10.1101/gad.187922.112 (2012).
[0323] 40 Vivanco, I. et al. Differential sensitivity of glioma- versus lung cancer-specific EGFR mutations to EGFR kinase inhibitors. Cancer Discov 2, 458-471, doi:10.1158/2159-8290.CD-11-0284 (2012).
[0324] 41 Forbes, S. A. et al. COSMIC (the Catalogue of Somatic Mutations in Cancer): a resource to investigate acquired mutations in human cancer. Nucleic Acids Res 38, D652-657, doi:10.1093/nar/gkp995 (2010).
[0325] 42 Northcott, P. A. et al. Subgroup-specific structural variation across 1,000 medulloblastoma genomes. Nature 488, 49-56, doi:10.1038/nature11327 (2012).
[0326] 43 Tiacci, E. et al. BRAF mutations in hairy-cell leukemia. The New England journal of medicine 364, 2305-2315, doi:10.1056/NEJMoa1014209 (2011).
[0327] 44 Iyer, M. K., Chinnaiyan, A. M. & Maher, C. A. ChimeraScan: a tool for identifying chimeric transcription in sequencing data. Bioinformatics 27, 2903-2904, doi:10.1093/bioinformatics/btr467 (2011).
[0328] S1 Tiacci, E. et al. BRAF mutations in hairy-cell leukemia. The New England journal of medicine 364, 2305-2315, doi:10.1056/NEJMoa1014209 (2011).
[0329] S2 Singh, D. et al. Transforming fusions of FGFR and TACC genes in human glioblastoma. Science 337, 1231-1235, doi:10.1126/science.1220834 (2012).
[0330] S3 Iyer, M. K., Chinnaiyan, A. M. & Maher, C. A. ChimeraScan: a tool for identifying chimeric transcription in sequencing data. Bioinformatics 27, 2903-2904, doi:10.1093/bioinformatics/btr467 (2011).
[0331] S4 Vilella, A. J. et al. EnsemblCompara GeneTrees: Complete, duplication-aware phylogenetic trees in vertebrates. Genome Res 19, 327-335, doi:10.1101/gr.073585.107 (2009).
[0332] S5 Seal, R. L., Gordon, S. M., Lush, M. J., Wright, M. W. & Bruford, E. A. genenames.org: the HGNC resources in 2011. Nucleic Acids Res 39, D514-519, doi:10.1093/nar/gkq892 (2011).
[0333] S6 Soding, J. Protein homology detection by HMM-HMM comparison. Bioinformatics 21, 951-960, doi:10.1093/bioinformatics/bti125 (2005).
[0334] S7 Roy, A., Kucukural, A. & Zhang, Y. I-TASSER: a unified platform for automated protein structure and function prediction. Nat Protoc 5, 725-738, doi:10.1038/nprot.2010.5 (2010).
[0335] S8 Stogios, P. J., Downs, G. S., Jauhal, J. J., Nandra, S. K. & Prive, G. G. Sequence and structural analysis of BTB domain proteins. Genome Biol 6, R82, doi:10.1186/gb-2005-6-10-r82 (2005).
[0336] S9 Errington, W. J. et al. Adaptor protein self-assembly drives the control of a cullin-RING ubiquitin ligase. Structure 20, 1141-1153, doi:10.1016/j.str.2012.04.009 (2012).
[0337] S10 Zhuang, M. et al. Structures of SPOP-substrate complexes: insights into molecular architectures of BTB-Cul3 ubiquitin ligases. Mol Cell 36, 39-50, doi:10.1016/j.molcel.2009.09.022 (2009).
[0338] S11 Canning, P. et al. Structural basis for Cul3 assembly with the BTB-Kelch family of E3 ubiquitin ligases. J Biol Chem, doi:10.1074/jbc.M112.437996 (2013).
[0339] S12 Fulop, V. & Jones, D. T. Beta propellers: structural rigidity and functional diversity. Curr Opin Struct Biol 9, 715-721 (1999).
[0340] S13 Carro, M. S. et al. The transcriptional network for mesenchymal transformation of brain tumours. Nature 463, 318-325, doi:10.1038/nature08712 (2010).
[0341] S14 Niola, F. et al. Mesenchymal high-grade glioma is maintained by the ID-RAP1 axis. J Clin Invest 123, 405-417, doi:10.1172/JCI63811 (2013).
[0342] S15 Zhao, X. et al. The N-Myc-DLL3 cascade is suppressed by the ubiquitin ligase Huwel to inhibit proliferation and promote neurogenesis in the developing brain. Dev Cell 17, 210-221, doi:10.1016/j.devce1.2009.07.009 (2009).
[0343] S16 Friedman, H. S. et al. Experimental chemotherapy of human medulloblastoma cell lines and transplantable xenografts with bifunctional alkylating agents. Cancer Res 48, 4189-4195 (1988).
[0344] S17 Srivastava, M. et al. The Amphimedon queenslandica genome and the evolution of animal complexity. Nature 466, 720-726, doi:10.1038/nature09201 (2010).
[0345] S18 Sebe-Pedros, A., Roger, A. J., Lang, F. B., King, N. & Ruiz-Trillo, I. Ancient origin of the integrin-mediated adhesion and signaling machinery. Proc Natl Acad Sci USA 107, 10142-10147, doi:10.1073/pnas.1002257107 (2010).

### Example 2—Genomic Alterations in Glioblastoma

[0346] Glioblastoma remains one of the most challenging forms of cancer to treat. This example discusses a computational platform that integrates the analysis of copy number variations and somatic mutations and unravels the landscape of in frame gene fusions in glioblastoma. Mutations were found with loss of heterozygosity of LZTR-1, an adaptor of Cul3-containing E3 ligase complexes. Mutations and deletions disrupt LZTR-1 function, which restrains self-renewal and growth of glioma spheres retaining stem cell features. Loss-of-function mutations of CTNND2 target a neural-specific gene and are associated with transformation of glioma cells along the very aggressive mesenchymal phenotype. Recurrent translocations are reported that fuse the coding sequence of EGFR to several partners, with EGFR-SEPT14 as the most frequent functional gene fusion in human glioblastoma. EGFR-SEPT14 fusions activate Stat3 signaling and confer mitogen independency and sensitivity to EGFR inhibition. These results provide important insights into the pathogenesis of glioblastoma and highlight new targets for therapeutic intervention.

[0347] Glioblastoma (GBM) is the most common primary intrinsic malignant brain tumor affecting ˜10,000 new patients each year with a median survival rate of 12-15 months^{1,2}. Identifying and understanding the functional significance of genetic alterations that drive initiation and progression of GBM is crucial to develop effective therapies. Previous efforts in GBM genome characterization identified somatic changes in well-known GBM genes (EGFR, PTEN, IDH1, TP53, NF1, etc.) and nominated putative cancer genes with somatic mutations, but the functional consequence of most alterations is unknown³⁻⁶. Furthermore, the abundance of passenger mutations and large regions of copy number variations (CNVs) complicates the definition of the landscape of driver mutations in glioblastoma. To address this challenge, a statistical approach was used to nominate driver genes in GBM by integrating somatic mutations identified by whole-exome sequencing with a CNVs analysis that prioritizes focality and magnitude of the genetic alterations.

[0348] Recurrent and oncogenic gene fusions are hallmarks of hematological malignancies and have also been uncovered in solid tumors^{7,8}. Recently, a small subset of GBM harbor FGFR-TACC gene fusions was reported indicating that the patients with FGFR-TACC-positive tumors would benefit from targeted FGFR kinase inhibition⁹. It remains unknown whether gene fusions involving other RTK-coding genes exist and produce oncogene addiction in GBM. Here, a large RNA-sequencing dataset of primary GBM and Glioma Sphere Cultures (GSCs) is investigated and the global landscape of in frame gene fusions in human GBM are reported.

[0349] Nomination of Candidate GBM Genes

[0350] Without being bound by theory, integration of somatic point mutations and focal CNVs will uncover candidate driver GBM genes. MutComFocal is an algorithm designed to rank genes by an integrated recurrence, focality and mutation score (see Methods). This strategy was applied to 139 GBM and matched normal DNA analyzed by whole-exome sequencing to identify somatic mutations and 469 GBM analyzed by the Affymetrix SNP6.0 platform to identify CNVs.

[0351] The whole-exome analysis revealed a mean of 43 nonsynonymous somatic mutations per tumor sample. The distribution of substitutions shows a higher rate of transitions versus tranversions (67%), with a strong preference for C->T and G->A (55%) (FIG. 6). As seen in other tumor types¹⁰, 19.2% of the mutations occurred in a CpG dinucleotide context (FIG. 7). Among somatic small nucleotide variants, the most frequently mutated genes have roles in cancer, including GBM (TP53, EGFR, PTEN, and IDH1). In addition to known cancer genes, new candidate driver genes were mutated in ˜5% of tumor samples. By integrating mutational and common focal genomic lesions, MutComFocal stratified somatically mutated genes into three groups: recurrently mutated genes without significant copy number alterations (Mut), in regions of focal and recurrent amplifications (Amp-Mut) and in regions of focal and recurrent deletions (Del-Mut).

[0352] A list of 67 genes were generated that score at the top of each of the three categories and included nearly all the genes previously implicated in GBM. Among these genes, (labeled in light grey in FIG. 1) are IDH1 (Mut, FIG. 1a), PIK3C2B, MDM4, MYCN, PIK3CA, PDGFRA, KIT, EGFR, and BRAF (Amp-Mut, FIG. 1B) and PIK3R1, PTEN, RB1, TP53, NF1 and ATRX (Del-Mut, FIG. 1c). The analysis also selected 52 new candidate driver genes previously unreported in GBM. Based upon their role in CNS development and homeostasis as well as their potential function in gliomagenesis, 24 genes were selected for re-sequencing in an independent dataset of 83 GBM and matched normal controls. Eighteen genes were found somatically mutated by Sanger sequencing in the independent panel (labeled in dark grey in FIG. 1). Each validated new GBM gene is targeted by somatic mutations and CNVs in a cumulative fraction comprised between 2.9% and 45.7% of GBM. Furthermore, mutations of the 18 new GBM genes occur mostly in tumors with global mutation rates similar to the mean of 43 mutations per tumor and well within the 95% confidence interval, indicating that mutations of the 18 new genes do not cluster in hypermutated tumors (FIG. 2C and FIG. 9).

[0353] Among the commonly mutated and focally deleted genes exhibiting top MutComFocal scores and validated in the independent GBM dataset, BCOR, LRP family members, HERC2, LZTR-1 and CTNND2. BCOR, an X-linked gene, encodes for a component of the nuclear co-repressor complex that is essential for normal development of neuroectoderm and stem cell functions¹¹⁻¹³. BCOR mutations have recently been described in retinoblastoma and medulloblastoma^{14,15}. LRP1B, a member of the LDL receptor family, is among the most frequently mutated genes in human cancer (FIG. 1c)¹⁶. Interestingly, two other LDL receptor family members (LRP2 and LRP1) are mutated in 4.4% and 2.9% of tumors, respectively (FIG. 1a). The LRP proteins are highly expressed in the neuroepithelium and are essential for forebrain morphogenesis in mouse and humans^{17,18}. The tumor suppressor function of LRP proteins in GBM may relate to the ability to promote chemosensitivity and control in the Sonic hedgehog signaling pathway, which is implicated in cancer initiating cells in GBM¹⁹⁻²¹. Localized on chromosome 15q13, the Hect ubiquitin ligase Herc2 gene is deleted and mutated in 15.1% and 2.2% of GBM cases, respectively. Herc2 has been implicated in severe neurodevelopmental syndromes and Herc2 substrates regulate genome stability and DNA damage-repair^{22,3}.

[0354] LZTR-1 Mutations Inactivate a Cullin-3 Adaptor to Drive Self-Renewal and Growth of Glioma Spheres

[0355] A gene that received one of the highest Del-Mut score by MutComFocal is LZTR-1 (FIG. 1c). The LZTR-1 coding region had non-synonymous mutations in 4.4%, and the LZTR-1 locus (human chromosome 22q11) was deleted in 22.4% of GBM. Among the 18 new GBM genes, LZTR-1 had the highest co-occurrence score of mutations and deletions (Fisher's exact test, p=0.0007). It also scored at the top of the list of genes whose CNVs are statistically correlated with expression (Pearson correlation between LZTR-1 CNVs and expression is 0.36, p-value<10⁻⁶ by Student's t-distribution). Finally, LZTR-1 emerged as the gene with the highest correlation for monoallelic expression of mutant alleles in tumors harboring LZTR-1 deletions (p-value=0.0007). Taken together, these findings indicate that LZTR-1 is concurrently targeted in GBM by mutations and copy number loss, fulfilling the two-hits model for tumor suppressor inactivation in cancer.

[0356] LZTR-1 codes for a protein with a characteristic Kelch-BTB-BACK-BTB-BACK domain architecture (FIGS. 2C, 8, 9) and is expressed in normal brain. The LZTR-1 gene is highly conserved in metazoans. Although it was initially proposed that LZTR-1 functions as a transcriptional regulator, this role was not confirmed in follow-up studies²⁴. Most proteins with BTB-BACK domains are substrate adaptors in Cullin-3 (Cul3) ubiquitin ligase complexes, in which the BTB-BACK region binds to the N-terminal domain of Cul3, while a ligand binding domain, often a Kelch 6-bladed β-propeller motif, binds to substrates targeted for ubiquitylation²⁵. To ask whether LZTR-1 directly binds Cul3, co-immunoprecipitation experiments were performed in human glioma cells. FIG. 15 shows that Cul3 immunoprecipitates contain LZTR-1, indicating that LZTR-1 is an adaptor in Cul3 ubiquitin ligase complexes.

[0357] To address the function of LZTR-1 mutants, a homology model of LZTR-1 was built based partly on the crystal structures of the MATH-BTB-BACK protein SPOP²⁶, the BTB-BACK-Kelch proteins KLHL3²⁷ and KLHL11²⁸, and the Kelch domain of Keap1²⁹ (FIG. 2b). Without being bound by theory, the second BTB-BACK region of LZTR-1 binds Cul3 because of a ϕ-X-E motif in this BTB domain, followed by a 3-Box/BACK region (FIG. 9)²⁶. However, the preceding BTB-BACK region can also participate in Cul3 binding. Five of seven LZTR-1 mutations identified in GBM are located within the Kelch domain and target highly conserved amino acids (FIG. 2b, FIG. 2C, FIG. 8). Interestingly, the concentration of LZTR-1 mutations in the Kelch domain reflects a similar pattern of mutations in the Kelch-coding region of KLHL3, recently identified in families with hypertension and electrolytic abnormalities^{30,31}.

[0358] The R198G and G248R mutations localize to the b-c loop of the Kelch domain, in a region predicted to provide the substrate-binding surface²⁹. The W105R mutation targets a highly conserved anchor residue in the Kelch repeats and the T2881 mutation disrupts a buried residue conserved in LZTR-1 (FIG. 2b, FIG. 2C, FIG. 8). Both mutations are expected to perturb folding of the Kelch domain. The E353STOP mutation is expected to produce a misfolded Kelch domain besides removing the C-terminal BTB-BACK regions. Located in the BTB-BACK domains, the remaining two mutations either truncate the entire BTB-BACK-BTB-BACK region (W437STOP) or are predicted to disrupt the folding of the last helical hairpin in the BTB-BACK domain (R810W, FIG. 2b).

[0359] To ask whether the mutations predicted to affect the BTB-BACK domains perturb the interaction with Cul3, in vitro translated wild type, E353STOP, W437STOP and R810W LZTR-1 Myc-tagged proteins were prepared and their ability to bind to Flag-Cul3 purified from mammalian cells was tested. Wild type LZTR-1 bound Flag-Cul3, but the E353STOP and W437STOP mutants lost this property. However, the R810W mutant retained Cul3 binding in this assay (FIG. 16A). Besides promoting ubiquitin-mediated degradation of substrates, Cullin adaptors are short-lived proteins that undergo auto-ubiquitylation and destruction by the same Cullin complexes that direct substrate ubiquitylation³²⁻³⁴. Thus, impaired ubiquitin ligase activity of the LZTR-1-Cul3 complex should result in accumulation of mutant LZTR-1 proteins. Each of the three LZTR-1 mutants predicted to compromise integrity of the BTB-BACK domains accumulated at higher levels than wild-type LZTR-1 in transient transfection assays (FIG. 16B). The steady state and half-life of the LZTR-1 R810W mutant protein were markedly increased, in the absence of changes of the mutant mRNA (FIG. 16C-D). Thus, as for the two truncated mutants, the R810W mutation compromised protein degradation.

[0360] Next, the biological consequences of LZTR-1 inactivation in human GBM. Differential gene expression pattern of GBM harboring mutations was examined and deletions of LZTR-1 or normal LZTR-1 revealed that tumors with genetic inactivation of LZTR-1 were enriched for genes associated with glioma sphere growth and proliferation³⁵ (FIG. 17A). Introduction of LZTR-1 in three independent GBM-derived sphere cultures resulted in strong inhibition of glioma sphere formation and expression of glioma stem cell markers (FIG. 17B-E). LZTR-1 also decreased the size of tumor spheres, induced a flat and adherent phenotype and reduced proteins associated with cell cycle progression (cyclin A, PLK1, p107, FIG. 17D-E). Interestingly, both R810W and W437STOP LZTR-1 mutations abolished LZTR-1 ability to impair glioma sphere formation (FIG. 17F). The above experiments indicate that LZTR-1 inactivation in human GBM drives self-renewal and growth of glioma spheres.

[0361] Inactivation of CTNND2 Induces Mesenchymal Transformation in Glioblastoma

[0362] Among the top ranking genes in MutComFocal, CTNND2 is expressed at the highest levels in normal brain. CTNND2 codes for δ-catenin, a member of the p120 subfamily of catenins expressed almost exclusively in the nervous system where it is crucial for neurite elongation, dendritic morphogenesis and synaptic plasticity³⁶⁻³⁸. Germ-line hemizygous loss of CTNND2 impairs cognitive functions and underlies some forms of mental retardation^{39,40}. CTNND2 shows pronounced clustering of mutations in GBM. The observed spectrum of mutations includes four mutations in the armadillo-coding domain and one in the region coding for the N-terminal coiled-coil domain (FIG. 10A), the two most relevant functional domains of δ-catenin. Each mutation targets highly conserved residues with probably (K629Q, A776T, S881L, D999E) and possibly (A71T) damaging consequences⁴¹. GBM harbors focal genomic losses of CTNND2, and deletions correlate with loss of CTNND2 expression (FIG. 10B).

[0363] Immunostaining experiments showed that δ-catenin is strongly expressed in normal brain, particularly in neurons, as demonstrated by co-staining with the neuronal markers β3-tubulin and MAP2 but not the astrocytic marker GFAP (FIG. 18A-B). Conversely, immunostaining of 69 GBM and western blot of 9 glioma sphere cultures revealed negligible or absent expression of δ-catenin in 21 tumors and in most glioma sphere cultures (FIG. 22). Oncogenic transformation in the CNS frequently disrupts the default proneural cell fate and induces an aberrant mesenchymal phenotype associated with aggressive clinical outcome⁴². Gene expression analysis of 498 GBM from ATLAS-TCGA showed that low CTNND2 expression is strongly enriched in tumors exhibiting the mesenchymal gene expression signature (t-test p-value=2.4 10⁻¹², FIG. 10D). Tumors with reduced CTNND2 were characterized by poor clinical outcome and, among them, tumors with CTNND2 copy number loss displayed the worst prognosis (FIG. 3C-D). Patients with low CTNND2 expression showed the worst clinical outcome in mesenchymal GBM, though non-mesenchymal tumors also demonstrated poor prognosis, albeit with reduced strength (FIG. 3D).

[0364] Mesenchymal transformation of GBM is associated with irreversible loss of proneural cell fate and neuronal markers⁴² and is detected in most established glioma cell lines. Expression of δcatenin in the U87 human glioma cell line reduced cell proliferation (FIG. 3E), elevated expression of neuronal proteins βIII-tubulin, PSD95 (a post-synaptic marker) and N-cadherin (FIG. 3G, FIG. 23A) and decreased mRNA and protein levels of mesenchymal markers (FIG. 3F, FIG. 18C, FIG. 23A). These effects were associated with morphologic changes characterized by neurite extension and development of branched dendritic processes (FIG. 3F, FIG. 23B-23C). Conversely, expression of the A776T, K629Q and D999E mutants of CTNND2 failed to induce neuronal features and down-regulate the mesenchymal marker fibronectin (FBN, FIG. 18C, FIG. 23B-23C). Consistent with δ-catenin inhibition of cell proliferation in glioma cells, only wild type δ-catenin decreased cyclin A, a S-phase cyclin (FIG. 18C).

[0365] Next, the effect of expressing δ-catenin in GBM-derived sphere culture #48 that lacks the endogenous δ-catenin protein (FIG. 22B) and expresses high levels of mesenchymal markers was analyzed 43 Introduction of δ-catenin in sphere culture #48 strongly reduced mesenchymal proteins smooth muscle actin (SMA), collagen-5A1 (Col5A1) and FBN, as measured by quantitative immunofluorescence (FIGS. 19A-B). It also induced βIII-tubulin more than eight-fold (FIGS. 19C-D). Time course analysis showed the highest degree of βIII-tubulin-positive neurite extension at 4-6 days post-transduction followed by progressive depletion of neuronal-like cells from culture (FIG. 19D). Finally, whether δ-catenin impacts self-renewal and growth of glioma spheres in vitro and their ability to grow as tumor masses in vivo were examined. In a limiting dilution assay, δ-catenin inhibited glioma sphere formation more than 8-fold (FIG. 19E). To determine the effect of δ-catenin on brain tumorigenesis in vivo, #48 glioma sphere cultures were generated expressing luciferase and bioluminescence imaging was conducted at different times after stereotactic transduction of control and δ-catenin-expressing cells in the mouse brain. When compared to controls, a 5-fold inhibition of tumor growth by δ-catenin at each time point analyzed (FIG. 19F, FIG. 23D). These results identify CTNND2 inactivation as a key genetic alteration driving the aggressive mesenchymal phenotype of GBM.

[0366] Recurrent EGFR Fusions in GBM

[0367] To identify gene fusions in GBM, RNA-seq data was analyzed from a total of 185 GBM samples (161 primary GBM plus 24 short-term glioma sphere cultures freshly isolated from patients carrying primary GBM). The analysis of RNA-seq led to the discovery of 92 candidate rearrangements giving rise to in-frame fusion transcripts (FIG. 27). Besides previously reported FGFR3-TACC3 fusions events, the most frequent recurrent in-frame fusions involved EGFR in 7.6% of samples (14/185, 3.8%-11.3% CI). Nine of 14 EGFR fusions included recurrent partners SEPT14 (6/185, 3.2%) and PSPH (3/185, 1.6%) as the 3′ gene segment in the fusion. All EGFR-SEPT14 and two of three EGFR-PSPH gene fusions occurred within amplified regions of the fusion genes (FIG. 24).

[0368] The quantitative analysis of expressed reads spanning the fusion breakpoint versus reads spanning EGFR exons not implicated in the fusion transcripts revealed that EGFR fusion genes were expressed at higher levels in five of nine tumors (FIG. 30). Two in-frame highly expressed fusions involving the neurotrophic tyrosine kinase receptor 1 gene (NTRK1) as the 3′ gene with two different 5′ partners (NFASC-NTRK1 and BCAN-NTRK1). Fusions involving NTRK1 are common in papillary thyroid carcinomas⁴⁴. Using EXomeFuse, an algorithm that reconstructs genomic fusions from whole-exome data, EGFR-SEPT14 and NRTK1 fusions result from recurrent chromosomal translocations and the corresponding genomic breakpoints were reconstructed (FIG. 31).

[0369] The sequence of the PCR products spanning the fusion breakpoint validated all three types of recurrent in frame fusion predictions (EGFR-SEPT14, EGFR-PSPH and NRTK1 fusions, FIGS. 4, 11, 12). In FIGS. 4A-B, the prediction and cDNA sequence validation is shown respectively, for one tumor harboring an EGFR-SEPT14 fusion (TCGA-27-1837). The amplified cDNA contained an open reading frame for a 1,041 amino-acid protein resulting from the fusion of EGFR residues 1-982 with SEPT14 residues 373-432 (FIG. 4C). Thus, the structure of EGFR-Septin14 fusions involves EGFR at the N-terminus, providing a receptor tyrosine kinase domain fused to a coiled-coil domain from Septin14. Exon-specific RNA-seq expression in TCGA-27-1837 demonstrated that EGFR and SEPT14 exons implicated in the fusion are highly expressed compared with mRNA sequences not included in the fusion event (FIG. 13).

[0370] Using PCR, the genomic breakpoint was mapped to chromosome 7 (#55,268,937 for EGFR and #55,870,909 for SEPT14, genome build GRCh37/hg19) within EGFR exon 25 and SEPT14 intron 9, creating a transcript in which the 5′ EGFR exon 24 is spliced to the 3′ SEPT14 exon 10 (FIG. 4D). Interestingly, the fused EGFR-PSPH cDNA and predicted fusion protein in sample TCGA-06-5408 involves the same EGFR N-terminal region implicated in the EGFR-SEPT14 with PSPH providing a carboxy-terminal portion of 35 amino acids (FIG. 11). An example of a fusion in which the EGFR-TK region is the 3′ partner is the CAND1-EGFR fusion in the glioma sphere culture #16 (FIG. 14). Each fusion transcript includes the region of the EGFR mRNA coding for the TK domain (FIG. 27). RT-PCR and genomic PCR followed by Sanger sequencing of GBM TCGA-06-5411 validated the NFASC-NTRK1 fusions in which the predicted fusion protein includes the TK domain of the high-affinity NGF receptor (TrkA) fused downstream to the immunoglobulin-like region of the cell adhesion and ankyrin-binding region of neurofascin (FIG. 12).

[0371] To confirm that GBM harbors recurrent EGFR fusions and determine the frequency in an independent dataset, cDNA was screened from a panel of 248 GBMs and discovered 10 additional cases with EGFR-SEPT14 fusions (4%). Conversely, NFASC-NTRK1 fusions were not detected in this dataset. A 2.2% (3/135) frequency of EGFR-PSPH fusions was determined.

[0372] The discovery of recurrent EGFR fusions in GBM is of particular interest. EGFR is activated in a significant fraction of primary GBM (˜25%) by an in-frame deletion of exons 2-7 (EGFRvIII)⁴⁵. However, seven of nine tumors harboring EGFR-SEPT14 and EGFR-PSPH gene fusions lacked the EGFRvIII rearrangement (FIG. 32). It was determined whether the most frequent EGFR fusion in GBM (EGFR-SEPT14) provides an alternative mechanism of EGFR activation and confers sensitivity to EGFR inhibition. First, whether EGFR gene fusions cluster into any gene expression subtype of GBM (proneural, neural, classical, mesenchymal) was investigated. Although no individual subtype displayed a statistically significant enrichment of EGFR fusions, 8 of 9 GBM harboring EGFR-SEPT14 or EGFR-PSPH belonged to the classical or mesenchymal subtype (Fisher's P value=0.05 for classical/mesenchymal enrichment, FIG. 33).

[0373] Next, the effects of ectopic EGFR-SEPT14, EGFRvIII or EGFR wild type on glioma cells were investigated. Lentiviral transduction of #48 human glioma sphere culture (which lacks genomic alteration of EGFR) showed that cells expressing EGFR-SEPT14 or EGFRvIII but not those expressing wild type EGFR or vector retained growth and self-renewal in the absence of EGF and bFGF (FIG. 20A). Accordingly, established glioma cell lines expressing EGFR-SEPT14 or EGFRvIII proliferated at higher rate than control cells or cells expressing wild type EGFR (FIG. 5A, FIG. 25). Furthermore, EGFR-SEPT14 and EGFRvIII markedly enhanced migration of glioma cells in a wound assay (FIG. 5B-C). The above findings indicate that EGFR-SEPT14 might constitutively activate signaling events downstream of EGFR. When analyzed in the presence and absence of mitogens, the expression of EGFR-SEPT14 (or EGFRvIII) in glioma sphere cultures #48 triggered constitutive activation of phospho-STAT3 but had no effects on phospho-ERK and phospho-AKT (FIG. 20B-C). This is consistent with enrichment of STAT3-target genes in primary human GBM harboring EGFR-SEPT14 fusions compared with tumors carrying wild type EGFR (FIG. 20D). Differential gene expression analysis identified a set of 9 genes up-regulated in EGFR-SEPT14 tumors compared with EGFRvIII-positive GBM (FIG. 26). These genes broadly relate to inflammatory/immune response, and some code for chemokines (CXCL9, 10, 11) that have been associated with aggressive glioma phenotypes⁴⁶.

[0374] Finally, it was investigated whether EGFR-SEPT14 fusions confer sensitivity to inhibition of EGFR-TK. Treatment of #48 expressing EGFR-SEPT14, EGFRvIII, wild type EGFR or vector control with lapatinib, an irreversible EGFR inhibitor recently proposed to target EGFR alterations in GBM′, revealed that EGFR-Sept14 and EGFRvIII but not wild-type EGFR sensitized glioma cells to pharmaceutical EGFR inhibition (FIG. 20E). Similar effects were obtained following treatment of #48-derivatives with erlotinib, another inhibitor of EGFR-TK (FIG. 5D).

[0375] To ask whether sensitivity to EGFR-TK inhibition is retained in human glioma cells naturally harboring EGFR-SEPT14 in vivo, an EGFR-SEPT14-positive GBM xenograft (D08-0537 MG) established from a heavily pretreated patient was used. Treatment of D08-0537 MG tumors with lapatinib or erlotinib showed that both drugs significantly delayed tumor growth, with lapatinib displaying the strongest anti-tumor effects. Conversely, EGFR inhibitors were ineffective against GBM xenograft D08-0714 MG, which lacks EGFR genomic alterations (FIG. 5E). Taken together, these data determine that EGFR-SEPT14 fusions confer mitogen-independent growth, constitutively activate STAT3 signaling and impart sensitivity to EGFR kinase inhibition to glioma cells harboring the fusion gene.

[0376] Discussion

[0377] A computational pipeline was described that computes frequency, magnitude and focality of CNVs at any loci in the human genome with the somatic mutation rate for genes residing at that genomic location, thus integrating into a single score two genetic hallmarks of driver cancer genes (focality of CNVs and point mutations). Besides recognizing nearly all genes known to have functional relevance in GBM, this study discovered and validated somatic mutations in 18 new genes, which also harbor focal and recurrent CNVs in a significant fraction of GBM. The importance of some of these genes extends beyond GBM, as underscored by cross-tumor relevance (e.g. BCOR), and protein family recurrence (e.g. LRP family members).

[0378] Also, the LZTR-1 mutations targeting highly conserved residues in the Kelch domain (W105, G248, T288) and in the second BTB-BACK domain (R810) are recurrent events in other tumor types⁴⁸. Thus, understanding the nature of substrates of LZTR-1-Cul3 ubiquitin ligase activity will provide important insights into the pathogenesis of multiple cancer types. The importance of LZTR-1 genetic alterations in GBM is underscored by concurrent targeting of LZTR-1 by mutations and deletions that supports a two-hits mechanism of tumor suppressor gene inactivation as well as the impact of mutations targeting the BTB-BACK domains on Cul3 binding and/or protein stability, and their ability to release glioma cells from the restraining activity of the wild-type protein on self-renewal.

[0379] The finding that loss-of-function of CTNND2 cluster in mesenchymal GBM provides a clue to the genetic events driving this aggressive GBM subtype. The function of δ-catenin for crucial neuronal morphogenesis indicates that full-blown mesenchymal transformation in the brain requires loss of master regulators constraining cell determination along the neuronal lineage. Introduction of δ-catenin in human glioma spheres collapsed the mesenchymal phenotype and inhibited sphere formation and tumor growth. Thus, the ability of δ-catenin to reprogram glioma cells expressing mesenchymal genes towards a neuronal fate unravels an unexpected plasticity of mesenchymal GBM that might be exploited therapeutically.

[0380] In this study, the landscape of gene fusions from a large dataset of GBM analyzed by RNA-Sequencing is also reported. In-frame gene fusions retaining the RTK-coding domain of EGFR emerged as the most frequent gene fusion in GBM. In this tumor, EGFR is frequently targeted by focal amplications and our finding underscores the strong recombinogenic probability of focally amplified genes, as recently reported for the myc locus in medulloblastoma⁴⁹. Resembling intragenic rearrangements that generate the EGFRvIII allele, EGFR-SEPT14 fusions impart to glioma cells the ability to self-renew and grow in the absence of mitogens, constitutively activate STAT3 signaling, and confer sensitivity to EGFR inhibition. These findings highlight the relevance of fusions implicating RTK-coding genes in the pathogenesis of GBM⁹. They also provide a strong rationale for the inclusion of GBM patients harboring EGFR fusions in clinical trials based on EGFR inhibitors.

[0381] Methods

[0382] SAVI (statistical algorithm for variant frequency identification). The frequencies of variant alleles were estimated in 139 paired tumor and normal whole-exome samples from TCGA using the SAVI pipelines⁵⁰. The algorithm estimates the frequency of variant alleles by constructing an empirical Bayesian prior for those frequencies, using data from the whole sample, and obtains a posterior distribution and high credibility intervals for each alleles⁵⁰. The prior and posterior are distributed over a discrete set of frequencies with a precision of 1% and are connected by a modified binomial likelihood, which allows for some error rate. More precisely, a prior distribution p(f) of the frequency f and a prior for the error e uniform on the interval [0,E] for a fixed 0≤E≤1 is assumed. The sequencing data at a particular allele is a random experiment producing a string of m (the total depth at the allele) bits with n ‘1’s (the variant depth at the allele). Assuming a binomial likelihood of the data and allowing for bits being misread because of random errors, the posterior probability P(f) of the frequency f is

$$P ( f ) = \frac{p ( f )}{C} \cdot \frac{1}{b - a} {{\int }_{f}}^{f + E - 2 Ef} {{x}^{n} ( 1 - x )}^{m - n} dx$$

[0383] where C is a normalization constant. For a particular allele, the value of E is determined by the quality of the nucleotides sequenced at that position as specified by their Phred scores. The SAVI pipeline takes as input the reads produced by the sequencing technology, filters out low-quality reads and maps the rest onto a human reference genome. After mapping, a Bayesian prior for the distribution of allele frequencies for each sample is constructed by an iterative posterior update procedure starting with a uniform prior. To genotype the sample, the posterior high-credibility intervals were used for the frequency of the alleles at each genomic location. Alternatively, combining the Bayesian priors from different samples, posterior high-credibility intervals were obtained for the difference between the samples of the frequencies of each allele. Finally, the statistically significant differences between the tumor and normal samples are reported as somatic variants. To estimate the positive prediction value of SAVI in the TCGA GBM samples, 41 mutations were selected for independent validation by Sanger sequencing. 39 of the 41 mutations using Sanger sequencing were confirmed, resulting in a 0.95 (95% CI 0.83-0.99) validation rate.

[0384] Candidate genes were ranked by the number of somatic nonsynonymous mutations. A robust fit of the ratio of nonsynonymous to synonymous mutations was generated with a bisquare weighting function. The excess of nonsynonymous alterations was estimated using a Poisson distribution with a mean equal to the product of the ratio from the robust fit and the number of synonymous mutations. Genes in highly polymorphic genomic regions were filtered out based on an independent cohort of normal samples. The list of these regions includes families of genes known to generate false positives in somatic predictions (for example, the HLA, KRT and OR gene families).

[0385] MutComFocal. Key cancer genes are often amplified or deleted in chromosomal regions containing many other genes. Point mutations and gene fusions, conversely, provide more specific information about which genes may be implicated in the oncogenic process. MutComFocal was developed, a Bayesian approach that assigns a driver score to each gene by integrating point mutations and CNV data from 469 GBMs (Affymetrix SNP6.0). In general, MutComFocal uses three different strategies. First, the focality component of the score is inversely proportional to the size of the genomic lesion to which a gene belongs and thus prioritizes more focal genomic lesions. Second, the recurrence component of the MutComFocal score is inversely proportional to the total number of genes altered in a sample, which prioritizes samples with a smaller number of altered genes. Third, the mutation component of the score is inversely proportional to the total number of genes mutated in a sample, which achieves the twofold goal of prioritizing mutated genes on one hand and prioritizing samples with a smaller number of mutations on the other.

[0386] More specifically, for a particular sample, let (c₁,N₁), . . . , (cₖ,Nₖ) describe the amplification lesions in that sample so that Nᵢ is the number of genes in the ith lesion and cᵢ is its copy number change from normal. For a gene belonging to the ith lesion, the amplification recurrence sample score is defined as (c₁,N₁), . . . , (cₖ,Nₖ), and its amplification focality sample score is defined as (cᵢ/Σcⱼ)×(1/Nᵢ). To obtain the amplification recurrence and focality scores for a particular gene, the corresponding sample scores were summed over all the samples and the result was normalized so that each score sums to 1. The deletion and recurrence scores are defined in a similar manner. The mutation score is analogous to a recurrence score in which it is assumed that mutated genes belong to lesions with only one gene.

[0387] The amplification/mutation score is defined as the product of the two amplification scores and the mutation score, whereas the deletion/mutation score is defined as the product of the two deletion scores and the mutation score. The amplification/mutation and deletion/mutation scores are normalized to 1, and for each score, genes are divided into tiers iteratively so that the top 2^{X} remaining genes are included in the next tier, where H is the entropy of the scores of the remaining genes normalized to 1. On the basis of their tier across the different types of scores, genes are assigned to being either deleted/mutated or amplified/mutated, and genes in the top tiers are grouped into contiguous regions. The top genes in each region are considered manually and selected for further functional validation.

[0388] The recurrence and focality scores can be interpreted as the posterior probabilities that a gene is driving the selection of the disease under two different priors, one global and one local in nature. The recurrence score is higher if a gene participates in many samples that do not have too many altered genes, whereas the focality score is higher if the gene participates in many focal lesions. Besides lending strong support to the inference of a gene as a potential driver, the directionality of the copy number alteration (amplification or deletion) informs the probable behavior of the candidate gene as an oncogene or tumor suppressor, respectively.

[0389] The genes displayed in FIG. 1 were selected on the basis of the MutComFocal ranking (top 250 genes), the size of the minimal region (less than 10 genes) and the frequency of mutations (more than 2% for deletion/mutations and at least 1% for amplification/mutations).

[0390] RNA-seq bioinformatics analysis. 161 RNA-seq GBM tumor samples were analyzed from TCGA, a public repository containing large-scale genome sequencing of different cancers, plus 24 patient-derived GSCs. Nine GSC samples reported in previous studies were kept in our analysis to evaluate recurrence⁹. The samples were analyzed using the ChimeraScan⁵¹ algorithm to detect a list of gene fusion candidates. Briefly, ChimeraScan detects those reads that discordantly align to different transcripts of the same reference (split inserts). These reads provide an initial set of putative fusion candidates. The algorithm then realigns the initially unmapped reads to the putative fusion candidates and detects those reads that align across the junction boundary (split reads). These reads provide the genomic coordinates of the breakpoint.

[0391] RNA-seq analysis detected a total of 39,329 putative gene fusion events. To focus the experimental analysis on biologically relevant fused transcripts, the Pegasus annotation pipeline (http://sourceforge.net/projects/pegasus-fus/) was applied. For each putative fusion, Pegasus reconstructs the entire fusion sequence on the basis of the genomic fusion breakpoint coordinates and gene annotations. Pegasus also annotates the reading frame of the resulting fusion sequences as either in frame or a frame shift. Moreover, Pegasus detects the protein domains that are either conserved or lost in the new chimeric event by predicting the amino acid sequence and automatically querying the UniProt web service. On the basis of the Pegasus annotation report, relevant gene fusions were selected for further experimental validation according to the reading frame and the conserved and lost domains. The selected list was based on in-frame events expressed by ten or more reads, with at least one read spanning the breaking point. To filter out candidate trans-splicing events, events with putative breakpoints at a distance of at least 25 kb were pursued.

[0392] Identification of genetic rearrangements using whole-exome data. Although whole-exome sequencing data contain low intronic coverage that reduces the sensitivity for fusion discovery, they are readily available through the TCGA database. To characterize the genomic breakpoint of the chromosomal rearrangement, EXome-Fuse, a new gene fusion discovery pipeline that is designed particularly to analyze whole-exome data, was designed. For the samples harboring EGFR-SEPT14, EGFR-PSPH, NFASC-NTRK1 and BCAN-NTRK1 fusions in RNA, EXome-Fuse was applied to the corresponding whole-exome sequencing data deposited in TCGA. This algorithm can be divided into three stages: split-insert identification, split-read identification and virtual reference alignment. Mapping against the human genome reference hg18 with BWA, all split inserts are first identified to compile a preliminary list of fusion candidates. This list was pruned of any false positives produced from paralogous gene pairs using the Duplicated Genes Database and the EnsemblCompara GeneTrees⁵². Pseudogenes in the candidate list were annotated using the list from the HUGO Gene Nomenclature Committee (HGNC) database⁵³ and were given lower priority. Candidates were also filtered out between homologous genes, as well as those with homologous or low-complexity regions around the breakpoint. For the remaining fusion candidates, any supporting split reads were probed for and their mates using BLAST with a word size of 16, identity cutoff of 90% and an expectation cutoff of 10⁻⁴. A virtual reference was created for each fusion transcript and all reads were realigned to calculate a final tally of split inserts and split reads such that all aligning read pairs maintain forward-reverse directionality.

[0393] Targeted exon sequencing. All protein-coding exons for the 24 genes of interest were sequenced using genomic DNA extracted from frozen tumors and matched blood. Five-hundred nanograms of DNA from each sample were sheared to an average size of 150 bp in a Covaris instrument for 360 s (duty cycle, 10%; intensity, 5; cycles per burst, 200). Bar-coded libraries were prepared using the Kapa High-Throughput Library Preparation Kit Standard (Kapa Biosystems). Libraries were amplified using the KAPA HiFi Library Amplification kit (Kapa Biosystems) (eight cycles). Libraries were quantified using Qubit Fluorimetric Quantitation (Invitrogen), and the quality and size was assessed using an Agilent Bioanalyzer. An equimolar pool of the four bar-coded libraries (300 ng each) was created, and 1,200 ng was input to exon capture using one reaction tube of the custom Nimblegen SeqCap EZ (Roche) with custom probes targeting the coding exons of the 38 genes. Capture by hybridization was performed according to the manufacturer's protocols with the following modifications: 1 nmol of a pool of blocker oligonucleotides (complementary to the bar-coded adapters) was used, and post-capture PCR amplification was done using the KAPA HiFi Library Amplification kit, instead of the Phusion High-Fidelity PCR Master Mix with HF Buffer Kit, in a 60 μl volume, as the Kapa HiFi kit greatly reduced or eliminated the bias against GC-rich regions.

[0394] The pooled capture library was quantified by Qubit (Invitrogen) and Bioanalyzer (Agilent) and sequenced in on an Illumina MiSeq sequencer using the 2×150 paired-end cycle protocol. Reads were aligned to the hg19 build of the human genome using BWA with duplicate removal using SAMtools as implemented by Illumina MiSeq Reporter. Variant detection was performed using GATK UnifiedGenotyper. Somatic mutations were identified for paired samples using SomaticSniper and filtered for frequency of less than 3% in normal samples and over 3% in tumor samples. Variants were annotated with the Charity annotator to identify protein-coding changes and cross referenced against known dbSNP, 1000 Genomes and COSMIC variants. Sanger sequencing was used to confirm each mutation from normal and tumor DNA.

[0395] Enrichment of amplified and deleted genes for single-nucleotide variants (SNVs). Although MutComFocal combines SNV and CNV data to identify genes driving oncogenesis, it does not explicitly determine whether amplified or deleted genes are enriched for SNVs within the same sample. Deletions and SNVs of a gene within the same sample might indicate a two-hit model of a tumor suppressor. Alternatively, amplifications and gain-of-function mutations of an oncogene within the sample might further promote oncogenesis. For each MutComFocal candidate gene, the number of TCGA samples was determined with both amplification and SNVs, amplification alone, SNVs alone or neither. The corresponding Fisher's P value was calculated. A similar analysis for deletions was performed.

[0396] Correlation between copy number and expression. One method of assessing the functional relevance of an amplified or deleted gene is to assess the effect of gene dosage. For each gene nominated by MutComFocal, the Pearson's correlation coefficient was calculated between copy number and expression. The corresponding P values were computed using paired Student's t test.

[0397] Allele-specific expression of SNVs. For a given gene nominated by MutComFocal, RNA sequencing can determine whether the mutant or wild-type allele is expressed. Toward this end, VCFtools54 was applied to the TCGA BAM RNA-seq files produced by TopHat, which produces the depth of reads calling the reference (R) and variant (V) allele. A measure of relative expression of the variant allele is then V/(V+R). For each mutation, the binomial P value of observing more than V out of V+R reads was calculated, assuming that it is equally probable for a read to call the variant or reference. The binomial P values of each mutation were then pooled using the Stouffer's Z-score method to calculate the combined P value per gene.

[0398] Ruling out passenger mutations in hypermutated samples. To rule out the possibility that MutComFocal candidates tend to be passenger mutations in hypermutated samples, the number of mutations was compared in samples harboring a MutComFocal mutation to the distribution N of the number of mutations in each TCGA sample. Because the number of TCGA samples was well above 30, N was assumed to be well approximated by the normal distribution and calculated the mean, μ, and s.d., σ. For each MutComFocal mutation, the Z-test was performed and all mutations failed statistical significance after correction by the Benjamini-Hochberg method.

[0399] Determining the presence of EGFRvIII transcripts. To determine the prevalence of EGFRvIII transcripts, an in-house script was created to calculate the number of split inserts and split reads supporting the junction between EGFR exons 1 and 8. The EGFRvIII isoform was considered to be expressed if there were more than five split reads or five split inserts in a sample.

[0400] Calculating the relative expression of EGFR fusions compared to wild-type EGFR. To determine the functional relevance of EGFR-SEPT14 and EGFR-PSPH fusions, the relative expression was determined between the fusion and wild-type transcripts within each sample on the basis of BAM files mapped by TopHat and provided by TCGA. As a proxy for expression of the transcript, the depth of reads covering either a mutant or wild-type junction was calculated. In particular, the depth of reads covering the fusion breakpoint of EGFR-SEPT14 or EGFR-PSPH was considered to estimate the expression of the fusion transcript. Because all EGFR fusions stereotypically involved exon 24 joined to either SEPT14 or PSPH, the depth of reads covering the junctions between EGFR exons 25-26, 26-27 and 27-28 to be a specific gauge of wild-type EGFR expression was assessed.

[0401] Enrichment of the classical and mesenchymal subtype among samples with EGFR fusions. To assess whether samples with EGFR fusions tended to occur in a particular GBM subtype, each TCGA GBM sample was first classified by expression according to the methods of Verhaak et al.⁶. The number of classical, mesenchymal, proneural and neural samples was then tallied with and without EGFR gene fusions. The combined class of classical and mesenchymal phenotype was enriched for EGFR fusions according to the Fisher's exact test.

[0402] Copy number variation in EGFR fusions. Gene fusions often arise from genomic instability. Motivated by this observation, segmented SNP array data was downloaded from TCGA and calculated the log 2 ratio between the tumor and normal copy numbers. This was plotted along the chromosomal neighborhood of EGFR, SEPT14 and PSPH (chr7:55,000,000-56,500,000).

[0403] GSEA. To determine the biological impact of LZTR1 mutations, GSEA⁵⁵ was used, which is an analytical tool that harnesses expression data to nominate gene sets enriched for a particular phenotype. Having identified TCGA samples with LZTR1 SNVs, GSEA was applied to the TCGA expression data. Samples were first compared with LZTR1 SNVs against those with wild-type LZTR1 (excluding LZTR1 deletions). To assess statistical significance, the data set was randomized by permuting gene sets 500 times and considered only gene sets with an FDR q<0.05.

[0404] Differential expression between samples with EGFR-SEPT14 and EGFRvIII. In-house differential expression analysis was also performed to determine a distinct molecular signature distinguishing the EGFR-SEPT14 and EGFRvIII phenotypes. Toward this end, a t test was performed comparing the expression of the two groups of samples for each gene. Correcting using the Benjamini-Hochberg method, only genes with FDR<0.05 were considered. In addition, genes were excluded with a variance less than the tenth percentile or absolute value lower than two across all samples. These filters left a predictive set of ten genes. Hierarchical clustering was then performed on the expression of these ten genes using Euclidean distance and average linkage.

[0405] Modeling of LZTR1. Structural templates for the kelch and BTB-BACK regions of human LZTR1 were identified with HHpred⁵⁶. An initial three-dimensional model was generated with the I-TASSER servers⁵⁷. The CUL3 N-terminal domain was docked onto the model by superposing the KLHL3^{BTB-BACK}/CUL3^{NTD} crystal structure²⁷ onto the second LZTR1 BTB-BACK domain. The model does not include higher quaternary structure, although many BTB domains, and many kelch domains, are known to self associate²⁵. The short linkage between the end of the first BACK domain and the beginning of the second BTB domain would seem to preclude an intrachain BTB-BTB pseudo-homodimer, and without being bond by theory, LZTR1 should self associate and form higher-order assemblies. Both BACK domains are the shorter, atypical form of the domain and consist of two helical hairpin motifs, as in SPOP^{26, 58}, and not the four-hairpin motif seen in most BTB-BACK-kelch proteins^{28, 58}. The model from the kelch domain predicts an unusual 1+3 velcro arrangement⁵⁹, with the N-terminal region contributing strand d of blade 1 and the C-terminal region contributing strands a, b and c of the same blade, although an alternative 2+2 velcro model cannot be ruled out.

[0406] Cell Culture. U87 cells were obtained from ATCC. SNB19, U87 and HEK-293T cells were cultured in DMEM supplemented with 10% fetal bovine serum (FBS). Growth rates were determined by plating cells in six-well plates at 3 d after infection with the lentivirus indicated in the figure legends. The number of viable cells was determined by Trypan blue exclusion in triplicate cultures obtained from triplicate independent infections. For the wound assay testing migration, confluent cells were scratched with a pipette tip and cultured in 0.25% FBS. After 16 h, images were taken using the Olympus IX70 connected to a digital camera. Images were processed using the ImageJ64 software. The area of the cell-free wound was assessed in triplicate samples. Experiments were repeated twice.

[0407] GBM-derived primary cultures were grown in DMEM:F12 medium containing N2 and B27 supplements and human recombinant FGF-2 and EGF (50 ng/ml each; Peprotech). For sphere formation, cells were infected with lentiviral particles. Four days later, single cells were plated at density of 1 cells per well in triplicate in low-attachment 96-well plates. The number and the size of spheres were scored after 10-14 d. Limiting dilution assays were performed as described previously⁶⁰. Spheres were dissociated into single cells and plated in low-attachment 96-well plates in 0.2 ml of medium containing growth factors (EGF and FGF-2), except for the EGFR-transduced cells, which were cultured in the absence of EGF. Cultures were left undisturbed for 10 d, and then the percentage of wells not containing spheres for each cell dilution was calculated and plotted against the number of cells per well. Linear regression lines were plotted, and the number of cells required to generate at least one sphere in every well (the stem cell frequency) was calculated. The experiment was repeated twice. Treatment of GBM primary cultures with erlotinib or lapatinib was performed in cells transduced with the pLOC vector, wild-type pLOC-EGFR, EGFRvIII or EGFR-SEPT14 and selected with blasticidin for 5 d. Cells were seeded on 6-cm dishes in the absence of EGF and treated with the indicated drugs at the indicated doses for 48 h. Each treatment group was seeded in triplicate. Absolute viable cell counts were determined by Trypan blue exclusion and counted on a hemocytometer. EGF stimulation of EGFR-transduced primary glioma cells was performed in cells deprived of growth factors for 48 h. Cells were collected at the indicated times and processed for protein blot analysis.

[0408] Immunofluorescence. Immunofluorescence staining on normal mouse and human brain and brain tumor tissue microarrays were performed as previously described^{43, 61, 62}. Immunofluorescence microscopy was performed on cells fixed with 4% paraformaldehyde in phosphate buffer. Cells were permeabilized using 0.2% Triton X-100. The antibodies and concentrations used in the immunofluorescence staining are detailed in FIG. 34.

[0409] Secondary antibodies conjugated to Alexa Fluor 594 (1:300, A11037, Molecular Probes) or Alexa 488 (1:500, A11008, Molecular Probes) were used. DNA was stained with DAPI (Sigma). Fluorescence microscopy was performed on a Nikon A1R MP microscope. Quantification of the fluorescence intensity staining in primary or established glioma cells was performed using NIH ImageJ software (see URLs). A histogram of the intensity of fluorescence of each point of a representative field for each condition was generated. The fluorescence intensity of ten fields from three independent experiments was scored, standardized to the number of cells in the field and divided by the intensity of the vector.

[0410] Protein blotting, immunoprecipitation and in vitro binding. Protein blot analysis and immunoprecipitation were performed using the antibodies detailed in FIG. 35. For the in vitro binding between CUL3 and LZTR1, wild-type and mutant LZTR1 were translated in vitro using the TNT Quick Coupled Transcription/Translation System (Promega). Flag-CUL3 was immunoprecipitated from transfected HEK-293T cells with Flag-M2 beads (Sigma) using RIPA buffer (50 mM Tris-HCl, pH 7.5, 150 mM NaCl, 1% NP-40, 0.5% sodium deoxycholate (DOC), 0.1% SDS, 1 mM phenylmethylsulfonyl fluoride (PMSF), 10 mM NaF, 0.5 M Na₃OV₄ (sodium orthovanadate) and Complete Protease Inhibitor Cocktail, Roche). Binding was performed in 200 mM NaCl plus 0.5% NP-40 for 2 h at 4° C. Immunocomplexes were analyzed by SDS-PAGE and immunoblot.

[0411] Cloning and Lentiviral Production.

[0412] The lentiviral expression vectors pLOC-GFP and pLOC-CTNND2 were purchased from Open Biosystems. Full-length EGFR-SEPT14 cDNA was amplified from tumor sample TCGA-27-1837. Wild-type EGFR, EGFRvIII and EGFR-SEPT14 cDNAs were cloned into the pLOC vector. pCDNA-MYC-Hist-LZTR1 was a kind gift²⁴. pCDNA-Flag-CUL3 was a gift. Wild-type and mutant cDNAs for LZTR1 and CTNND2 obtained by site-directed mutagenesis (QuikChange II, Agilent) were cloned into the pLOC vector. Lentiviral particles were produced using published protocols^{43, 61, 62, 63, 64}.

[0413] Genomic PCR and RT-PCR. Total RNA was extracted from cells using an RNeasy Mini Kit (QIAGEN) following the manufacturer's instructions. Five-hundred nanograms of total RNA was retrotranscribed using the Superscript III kit (Invitrogen) following the manufacturer's instructions. The cDNAs obtained after the retrotranscription were used as templates for quantitative PCR as described^{43, 64}. The reaction was performed with a Roche480 thermal cycler using the Absolute Blue QPCR SYBR Green Mix from Thermo Scientific. The relative amount of specific mRNA was normalized to GAPDH. Results are presented as the mean±s.d. of triplicate amplifications. The validation of fusion transcripts was performed using both genomic PCR and RT-PCR with forward and reverse primer combinations designed within the margins of the paired-end read sequences detected by RNA-seq. Expressed fusion transcript variants were subjected to direct sequencing to confirm the sequence and translation frame. The primers used for the screening of gene fusions are detailed in FIG. 36. The primers used for genomic detection of gene fusions are listed in FIG. 37. Semiquantitative RT-PCR to detect exogenous wild-type MYC-LZTR1 and mutant p.Arg801Trp LZTR1 was performed using the primers listed in FIG. 38.

[0414] Subcutaneous xenografts and drug treatment. Female athymic mice (nu/nu genotype, BALB/c background, 6-8 weeks old) were used for all antitumor studies. Patient-derived adult human glioblastoma xenografts were maintained. Xenografts were excised from host mice under sterile conditions and homogenized with the use of a tissue press and modified tissue cytosieve (Biowhitter Inc.), and tumor homogenate was loaded into a repeating Hamilton syringe (Hamilton, Co.) dispenser. Cells were injected subcutaneously into the right flank of the athymic mouse at an inoculation volume of 50 ml with a 19-gauge needle⁶⁵.

[0415] Subcutaneous tumors were measured twice weekly with hand-held vernier calipers (Scientific Products). Tumor volumes (V) were calculated with the following formula: ((width)²×(length))/2=V (mm³). For the subcutaneous tumor studies, groups of mice randomly selected by tumor volume were treated with EGFR kinase inhibitors when the median tumor volumes were an average of 150 mm³ and were compared with control animals receiving vehicle (saline).

[0416] Erlotinib was administered at 100 mg per kg body weight orally once per day for 10 d. Lapatinib was administered at 75 mg per kg body weight orally twice per day for 20 d. Response to treatment was assessed by a delay in tumor growth and tumor regression.

[0417] Growth delay, expressed as a T-C value, is defined as the difference in days between the median time required for tumors in treated and control animals to reach a volume five times greater than that measured at the start of the treatment. Tumor regression is defined as a decrease in tumor volume over two successive measurements. Statistical analysis was performed using a SAS statistical analysis program, the Wilcoxon rank-order test for growth delay and Fisher's exact test for tumor regression.

[0418] Intracranial injection. GBM-derived primary cells were first infected with a lentivirus expressing luciferase and subsequently transduced with the pLOC vector or pLOC-CTNND2 lentiviral particles. Intracranial injection was performed in 9-week-old male nu/nu mice (Charles River Laboratories). Briefly, 5≤10⁵ cells were resuspended in 2.5 μl of PBS and injected into the caudate putamen using a stereotaxic frame (coordinates relative to the bregma: 0.6 mm anterior; 1.65 mm medium-lateral; 3 mm depth-ventral). Tumor growth was monitored using the IVIS Imaging system. Briefly, mice were anesthetized with 3% isoflurane before intraperitoneal injection of 100 mg per kg body weight n-luciferin (Xenogen). Ten minutes after injection of n-luciferin, images were acquired for 1 min with the Xenogen IVIS system (Xenogen) using Living Image acquisition and analysis software (Xenogen). The bioluminescent signal was expressed in photons per second and displayed as a pseudo-color image representing the spatial distribution of photon counts.

[0419] URLs. DNA and RNA sequencing and copy number variant data in The Cancer Genome Atlas (TCGA), http://cancergenome.nih.gov; glioma patient survival data from the Repository for Molecular Brain Neoplasia Data (REMBRANDT), https://caintegrator.nci.nih.gov/rembrandt/; sequence data deposition in database of Genotypes and Phenotypes (dbGaP), http://www.ncbi.nlm.nih.gov/gap; gene fusion annotation software package Pegasus, http://sourceforge.net/projects/pegasus-fus/.

[0420] Data access. RNA sequencing of twenty-four human GBM sphere cultures in this study were deposited under the dbGaP study accession phs000505.v2.pl. RNA and DNA sequencing of TCGA GBM samples was also analyzed from the dbGaP study accession phs000178.vl.pl.

### REFERENCES FOR EXAMPLE 2

[0421] 1 Porter, K. R., McCarthy, B. J., Freels, S., Kim, Y. & Davis, F. G. Prevalence estimates for primary brain tumors in the United States by age, gender, behavior, and histology. Neuro-oncology 12, 520-527, doi:10.1093/neuonc/nop066 (2010).
[0422] 2 Stupp, R. et al. Radiotherapy plus concomitant and adjuvant temozolomide for glioblastoma. The New England journal of medicine 352, 987-996, doi:10.1056/NEJMoa043330 (2005).
[0423] 3 Cancer Genome Atlas Research, N. Comprehensive genomic characterization defines human glioblastoma genes and core pathways. Nature 455, 1061-1068, doi:10.1038/nature07385 (2008).
[0424] 4 Noushmehr, H. et al. Identification of a CpG island methylator phenotype that defines a distinct subgroup of glioma. Cancer Cell 17, 510-522, doi:10.1016/j.ccr.2010.03.017 (2010).
[0425] 5 Parsons, D. W. et al. An integrated genomic analysis of human glioblastoma multiforme. Science 321, 1807-1812, doi:10.1126/science.1164382 (2008).
[0426] 6 Verhaak, R. G. et al. Integrated genomic analysis identifies clinically relevant subtypes of glioblastoma characterized by abnormalities in PDGFRA, IDH1, EGFR, and NFL Cancer Cell 17, 98-110, doi:10.1016/j.ccr.2009.12.020 (2010).
[0427] 7 Bass, A. J. et al. Genomic sequencing of colorectal adenocarcinomas identifies a recurrent VTI1A-TCF7L2 fusion. Nat Genet 43, 964-968, doi:10.1038/ng.936 (2011).
[0428] 8 Chinnaiyan, A. M. & Palanisamy, N. Chromosomal aberrations in solid tumors. Prog Mol Biol Transl Sci 95, 55-94, doi:10.1016/B978-0-12-385071-3.00004-6 (2010).
[0429] 9 Singh, D. et al. Transforming fusions of FGFR and TACC genes in human glioblastoma. Science 337, 1231-1235, doi:10.1126/science.1220834 (2012).
[0430] 10 Rubin, A. F. & Green, P. Mutation patterns in cancer genomes. Proc Natl Acad Sci USA 106, 21766-21770, doi:10.1073/pnas.0912499106 (2009).
[0431] 11 Fan, Z. et al. BCOR regulates mesenchymal stem cell function by epigenetic mechanisms. Nat Cell Biol 11, 1002-1009, doi:10.1038/ncb1913 (2009).
[0432] 12 Wamstad, J. A. & Bardwell, V. J. Characterization of Bcor expression in mouse development. Gene Expr Patterns 7, 550-557, doi:10.1016/j.modgep.2007.01.006 (2007).
[0433] 13 Wamstad, J. A., Corcoran, C. M., Keating, A. M. & Bardwell, V. J. Role of the transcriptional corepressor Bcor in embryonic stem cell differentiation and early embryonic development. PLoS One 3, e2814, doi:10.1371/journal.pone.0002814 (2008).
[0434] 14 Pugh, T. J. et al. Medulloblastoma exome sequencing uncovers subtype-specific somatic mutations. Nature 488, 106-110, doi:10.1038/nature11329 (2012).
[0435] 15 Zhang, J. et al. A novel retinoblastoma therapy from genomic and epigenetic analyses. Nature 481, 329-334, doi:10.1038/nature10733 (2012).
[0436] 16 Beroukhim, R. et al. The landscape of somatic copy-number alteration across human cancers. Nature 463, 899-905, doi:10.1038/nature08822 (2010).
[0437] 17 Kantarci, S. et al. Mutations in LRP2, which encodes the multiligand receptor megalin, cause Donnai-Barrow and facio-oculo-acoustico-renal syndromes. Nat Genet 39, 957-959, doi:10.1038/ng2063 (2007).
[0438] 18 Willnow, T. E. et al. Defective forebrain development in mice lacking gp330/megalin. Proc Natl Acad Sci USA 93, 8460-8464 (1996).
[0439] 19 Christ, A. et al. LRP2 is an auxiliary SHH receptor required to condition the forebrain ventral midline for inductive signals. Dev Cell 22, 268-278, doi:10.1016/j.devce1.2011.11.023 (2012).
[0440] 20 Cowin, P. A. et al. LRP1B deletion in high-grade serous ovarian cancers is associated with acquired chemotherapy resistance to liposomal doxorubicin. Cancer Res 72, 4060-4073, doi:10.1158/0008-5472.CAN-12-0203 (2012).
[0441] 21 Lima, F. R. et al. Glioblastoma: therapeutic challenges, what lies ahead. Biochim Biophys Acta 1826, 338-349, doi: 10.1016/j.bbcan.2012.05.004 (2012).
[0442] 22 Bekker-Jensen, S. et al. HERC2 coordinates ubiquitin-dependent assembly of DNA repair factors on damaged chromosomes. Nat Cell Biol 12, 80-86; sup pp 81-12, doi:10.1038/ncb2008 (2010).
[0443] 23 Harlalka, G. V. et al. Mutation of HERC2 causes developmental delay with Angelman-like features. J Med Genet 50, 65-73, doi:10.1136/jmedgenet-2012-101367 (2013).
[0444] 24 Nacak, T. G., Leptien, K., Fellner, D., Augustin, H. G. & Kroll, J. The BTB-kelch protein LZTR-1 is a novel Golgi protein that is degraded upon induction of apoptosis. J Biol Chem 281, 5065-5071, doi:10.1074/jbc.M509073200 (2006).
[0445] 25 Stogios, P. J., Downs, G. S., Jauhal, J. J., Nandra, S. K. & Prive, G. G. Sequence and structural analysis of BTB domain proteins. Genome Biol 6, R82, doi:10.1186/gb-2005-6-10-r82 (2005).
[0446] 26 Errington, W. J. et al. Adaptor protein self-assembly drives the control of a cullin-RING ubiquitin ligase. Structure 20, 1141-1153, doi:10.1016/j.str.2012.04.009 (2012).
[0447] 27 Ji, A. X. & Prive, G. G. Crystal structure of KLHL3 in complex with Cullin3. PLoS One 8, e60445, doi:10.1371/journal.pone.0060445 (2013).
[0448] 28 Canning, P. et al. Structural basis for Cul3 assembly with the BTB-Kelch family of E3 ubiquitin ligases. J Biol Chem, doi:10.1074/jbc.M112.437996 (2013).
[0449] 29 Lo, S. C., Li, X., Henzl, M. T., Beamer, L. J. & Hannink, M. Structure of the Keap1:Nrf2 interface provides mechanistic insight into Nrf2 signaling. EMBO J 25, 3605-3617, doi:10.1038/sj.emboj.7601243 (2006).
[0450] 30 Boyden, L. M. et al. Mutations in kelch-like 3 and cullin 3 cause hypertension and electrolyte abnormalities. Nature 482, 98-102, doi:10.1038/nature10814 (2012).
[0451] 31 Louis-Dit-Picard, H. et al. KLHL3 mutations cause familial hyperkalemic hypertension by impairing ion transport in the distal nephron. Nat Genet 44, 456-460, S451-453, doi:10.1038/ng.2218 (2012).
[0452] 32 Emanuele, M. J. et al. Global identification of modular cullin-RING ligase substrates. Cell 147, 459-474, doi:10.1016/j.cell.2011.09.019 (2011).
[0453] 33 Galan, J. M. & Peter, M. Ubiquitin-dependent degradation of multiple F-box proteins by an autocatalytic mechanism. Proc Natl Acad Sci USA 96, 9124-9129 (1999).
[0454] 34 Zhang, D. D. et al. Ubiquitination of Keap1, a BTB-Kelch substrate adaptor protein for Cul3, targets Keap1 for degradation by a proteasome-independent pathway. J Biol Chem 280, 30091-30099, doi:10.1074/jbc.M501279200 (2005).
[0455] 35 Gunther, H. S. et al. Glioblastoma-derived stem cell-enriched cultures form distinct subgroups according to molecular and phenotypic criteria. Oncogene 27, 2897-2909, doi:10.1038/sj.onc.1210949 (2008).
[0456] 36 Abu-Elneel, K. et al. A delta-catenin signaling pathway leading to dendritic protrusions. J Biol Chem 283, 32781-32791, doi:10.1074/jbc.M804688200 (2008).
[0457] 37 Arikkath, J. et al. Delta-catenin regulates spine and synapse morphogenesis and function in hippocampal neurons during development. J Neurosci 29, 5435-5442, doi:10.1523/JNEUROSCI.0835-09.2009 (2009).
[0458] 38 Kosik, K. S., Donahue, C. P., Israely, I., Liu, X. & Ochiishi, T. Delta-catenin at the synaptic-adherens junction. Trends Cell Biol 15, 172-178, doi:10.1016/j.tcb.2005.01.004 (2005).
[0459] 39 Israely, I. et al. Deletion of the neuron-specific protein delta-catenin leads to severe cognitive and synaptic dysfunction. Curr Biol 14, 1657-1663, doi:10.1016/j.cub.2004.08.065 (2004).
[0460] 40 Jun, G. et al. delta-Catenin is genetically and biologically associated with cortical cataract and future Alzheimer-related structural and functional brain changes. PLoS One 7, e43728, doi:10.1371/journal.pone.0043728 (2012).
[0461] 41 Hicks, S., Wheeler, D. A., Plon, S. E. & Kimmel, M. Prediction of missense mutation functionality depends on both the algorithm and sequence alignment employed. Hum Mutat 32, 661-668, doi:10.1002/humu.21490 (2011).
[0462] 42 Phillips, H. S. et al. Molecular subclasses of high-grade glioma predict prognosis, delineate a pattern of disease progression, and resemble stages in neurogenesis. Cancer Cell 9, 157-173, doi:10.1016/j.ccr.2006.02.019 (2006).
[0463] 43 Carro, M. S. et al. The transcriptional network for mesenchymal transformation of brain tumours. Nature 463, 318-325, doi:10.1038/nature08712 (2010).
[0464] 44 Pierotti, M. A. & Greco, A. Oncogenic rearrangements of the NTRK1/NGF receptor. Cancer Lett 232, 90-98, doi:10.1016/j.canlet.2005.07.043 (2006).
[0465] 45 Dunn, G. P. et al. Emerging insights into the molecular and cellular basis of glioblastoma. Genes Dev 26, 756-784, doi:10.1101/gad.187922.112 (2012).
[0466] 46 Liu, C. et al. Chemokine receptor CXCR3 promotes growth of glioma. Carcinogenesis 32, 129-137, doi:10.1093/carcin/bgq224 (2011).
[0467] 47 Vivanco, I. et al. Differential sensitivity of glioma- versus lung cancer-specific EGFR mutations to EGFR kinase inhibitors. Cancer Discov 2, 458-471, doi:10.1158/2159-8290.CD-11-0284 (2012).
[0468] 48 Forbes, S. A. et al. COSMIC (the Catalogue of Somatic Mutations in Cancer): a resource to investigate acquired mutations in human cancer. Nucleic Acids Res 38, D652-657, doi:10.1093/nar/gkp995 (2010).
[0469] 49 Northcott, P. A. et al. Subgroup-specific structural variation across 1,000 medulloblastoma genomes. Nature 488, 49-56, doi:10.1038/nature11327 (2012).
[0470] Srivastava, M. et al. The Amphimedon queenslandica genome and the evolution of animal complexity. Nature 466, 720-726 (2010).
[0471] Stogios et al. Sequence and structural analysis of BTB domain proteins. Genome Biol. 6(10):R82 (2005).
[0472] Soding, J. Protein homology detection by HMM-HMM comparison. Bioinformatics. 21(7):951-60 (2005).

### ANNOTATIONS TO FIGURES

[0473] Annotation information in each column is described below for FIG. 27:
[0474] sample: Name of TCGA or private sample.
[0475] #chrom5p: 5′ chromosome
[0476] #start5p: 5′ genomic start coordinate
[0477] #end5p: 5′ genomic end coordinate
[0478] #chrom3p: 3′ chromosome
[0479] #start3p: 3′ genomic start coordinate
[0480] #end3p: 3′ genomic end coordinate
[0481] strand5p: 5′ strand
[0482] strand3p: 3′ strand
[0483] genes5p: 5′ gene
[0484] genes3p: 3′ gene
[0485] total_frags (split inserts+split reads): Total number of split inserts and split reads
[0486] spanning_frags (split reads): Number of split reads
[0487] GeneBreakpoint5p: The genomic coordinate of the breakpoint in the 5′ gene
[0488] GeneBreakpoint3p: The genomic coordinate of the breakpoint in the 3′ gene
[0489] FrameType: Reading frame of gene fusions. Values include in-frame, frameshift, or null (no transcript information was found in the Ensembl Homo_sapiens.GRCh37.60.gtf file).
[0490] FusedSequence: Reconstructed sequence of the fusion RNA transcript
[0491] ProteinStart5p: The start coordinate of the 5′ protein segment
[0492] ProteinStop5p: The stop coordinate (breakpoint) of the 5′ protein segment
[0493] ProteinStart3p: The start coordinate (breakpoint) of the 3′ protein segment
[0494] ProteinStop3p: The stop coordinate of the 3′ protein segment
[0495] ProteinSequence: Reconstructed sequence of the fusion protein
[0496] ExonBreak5p: The last exon of the 5′ gene before the breakpoint
[0497] ExonBreak3p: The first exon of the 3′ gene after the breakpoint

[0498] Annotation information in each column is described below for FIG. 28:
[0499] sample: Name of TCGA sample
[0500] split reads: Total number of split reads
[0501] gene5p: 5′ gene
[0502] chr5p: 5′ chromosome
[0503] sense5p: 5′ sense
[0504] start5p: 5′ genomic start coordinate
[0505] end5p: 5′ genomic end coordinate
[0506] breakpoint5p: 5′ genomic coordinate of breakpoint
[0507] exonBeforeBreakpoint5p: Exon number of 5′ gene before the breakpoint
[0508] gene3p: 3′ gene
[0509] chr3p: 3′ chromosome
[0510] sense3p: 3′ sense
[0511] start3p: 3′ genomic start coordinate
[0512] end3p: 3′ genomic end coordinate
[0513] breakpoint3p: 3′ genomic coordinate of breakpoint
[0514] exonAfterBreakpoint3p: Exon number of 3′ gene after the breakpoint
[0515] split inserts: Total number of split inserts
[0516] posA5p: Coordinate of split insert read closest to 5′ end in 5′ gene
[0517] posB5p: Coordinate of split insert read closest to 3′ end in 5′ gene
[0518] readDir5p: Read direction of split insert reads in 5′ gene
[0519] posA3p: Coordinate of split insert read closest to 5′ end in 3′ gene
[0520] posB3p: Coordinate of split insert read closest to 3′ end in 3′ gene
[0521] readDir3p: Read direction of split insert reads in 3′ gene

[0522] Annotation information in each column is described below for FIG. 31:
[0523] sample: Name of TCGA sample
[0524] split reads: Total number of split reads
[0525] gene5p: 5′ gene
[0526] chr5p: 5′ chromosome
[0527] sense5p: 5′ sense
[0528] start5p: 5′ genomic start coordinate
[0529] end5p: 5′ genomic end coordinate
[0530] breakpoint5p: 5′ genomic coordinate of breakpoint
[0531] exonBeforeBreakpoint5p: Exon number of 5′ gene before the breakpoint
[0532] gene3p: 3′ gene
[0533] chr3p: 3′ chromosome
[0534] sense3p: 3′ sense
[0535] start3p: 3′ genomic start coordinate
[0536] end3p: 3′ genomic end coordinate
[0537] breakpoint3p: 3′ genomic coordinate of breakpoint
[0538] exonAfterBreakpoint3p: Exon number of 3′ gene after the breakpoint
[0539] split inserts: Total number of split inserts
[0540] posA5p: Coordinate of split insert read closest to 5′ end in 5′ gene
[0541] posB5p: Coordinate of split insert read closest to 3′ end in 5′ gene
[0542] readDir5p: Read direction of split insert reads in 5′ gene
[0543] posA3p: Coordinate of split insert read closest to 5′ end in 3′ gene
[0544] posB3p: Coordinate of split insert read closest to 3′ end in 3′ gene
[0545] readDir3p: Read direction of split insert reads in 3′ gene

The application's sequence listing, which the Patent Office published only in electronic form, follows.

SEQUENCE LISTING (8495 sequences)

SEQ ID NO: 1 - protein, 52 aa, synthetic construct
  source 1..52: note = Description of Artificial Sequence: Synthetic polypeptide
SRPKFRELIIEFSKMARDPQRYLVIQLQDKFEHLKMIQQEEIRKLEEEKKQL

SEQ ID NO: 2 - DNA, 157 bp, synthetic construct
  source 1..157: mol_type = other DNA; note = Description of Artificial Sequence: Synthetic polynucleotide
  CDS 1..156
agtcgcccaaagttccgtgagttgatcatcgaattctccaaaatggcccgagacccccagcgctaccttgtcattcagctgcaggacaagttcgagcatcttaaaatgattcaacaggaggagataaggaagctcgaggaagagaaaaaacaactgg

SEQ ID NO: 3 - protein, 8 aa, synthetic construct
  source 1..8: note = Description of Artificial Sequence: Synthetic peptide
LVIQLQDK

SEQ ID NO: 4 - DNA, 24 bp, synthetic construct
  source 1..24: mol_type = other DNA; note = Description of Artificial Sequence: Synthetic oligonucleotide
  CDS 1..24
cttgtcattcagctgcaggacaag

SEQ ID NO: 5 - protein, 1041 aa, synthetic construct
  source 1..1041: note = Description of Artificial Sequence: Synthetic polypeptide
MRPSGTAGAALLALLAALCPASRALEEKKVCQGTSNKLTQLGTFEDHFLSLQRMFNNCEVVLGNLEITYVQRNYDLSFLKTIQEVAGYVLIALNTVERIPLENLQIIRGNMYYENSYALAVLSNYDANKTGLKELPMRNLQEILHGAVRFSNNPALCNVESIQWRDIVSSDFLSNMSMDFQNHLGSCQKCDPSCPNGSCWGAGEENCQKLTKIICAQQCSGRCRGKSPSDCCHNQCAAGCTGPRESDCLVCRKFRDEATCKDTCPPLMLYNPTTYQMDVNPEGKYSFGATCVKKCPRNYVVTDHGSCVRACGADSYEMEEDGVRKCKKCEGPCRKVCNGIGIGEFKDSLSINATNIKHFKNCTSISGDLHILPVAFRGDSFTHTPPLDPQELDILKTVKEITGFLLIQAWPENRTDLHAFENLEIIRGRTKQHGQFSLAVVSLNITSLGLRSLKEISDGDVIISGNKNLCYANTINWKKLFGTSGQKTKIISNRGENSCKATGQVCHALCSPEGCWGPEPRDCVSCRNVSRGRECVDKCNLLEGEPREFVENSECIQCHPECLPQAMNITCTGRGPDNCIQCAHYIDGPHCVKTCPAGVMGENNTLVWKYADAGHVCHLCHPNCTYGCTGPGLEGCPTNGPKIPSIATGMVGALLLLLVVALGIGLFMRRRHIVRKRTLRRLLQERELVEPLTPSGEAPNQALLRILKETEFKKIKVLGSGAFGTVYKGLWIPEGEKVKIPVAIKELREATSPKANKEILDEAYVMASVDNPHVCRLLGICLTSTVQLITQLMPFGCLLDYVREHKDNIGSQYLLNWCVQIAKGMNYLEDRRLVHRDLAARNVLVKTPQHVKITDFGLAKLLGAEEKEYHAEGGKVPIKWMALESILHRIYTHQSDVWSYGVTVWELMTFGSKPYDGIPASEISSILEKGERLPQPPICTIDVYMIMVKCWMIDADSRPKFRELIIEFSKMARDPQRYLVIQLQDKFEHLKMIQQEEIRKLEEEKKQLEGEIIDFYKMKAASEALQTQLSTDTKKDKHRKK

SEQ ID NO: 6 - skipped

SEQ ID NO: 7 - protein, 41 aa, synthetic construct
  source 1..41: note = Description of Artificial Sequence: Synthetic polypeptide
SRPKFRELIIEFSKMARDPQRYLVIQDAFIGFGGNVIRQQV

SEQ ID NO: 8 - DNA, 125 bp, synthetic construct
  source 1..125: mol_type = other DNA; note = Description of Artificial Sequence: Synthetic polynucleotide
  CDS 1..123
agtcgcccaaagttccgtgagttgatcatcgaattctccaaaatggcccgagacccccagcgctaccttgtcattcaggatgctttcattggatttggaggaaatgtgatcaggcaacaagtcaa

SEQ ID NO: 9 - protein, 8 aa, synthetic construct
  source 1..8: note = Description of Artificial Sequence: Synthetic peptide
LVIQDAFI

SEQ ID NO: 10 - DNA, 24 bp, synthetic construct
  source 1..24: mol_type = other DNA; note = Description of Artificial Sequence: Synthetic oligonucleotide
  CDS 1..24
cttgtcattcaggatgctttcatt

SEQ ID NO: 11 - protein, 1017 aa, synthetic construct
  source 1..1017: note = Description of Artificial Sequence: Synthetic polypeptide
MRPSGTAGAALLALLAALCPASRALEEKKVCQGTSNKLTQLGTFEDHFLSLQRMFNNCEVVLGNLEITYVQRNYDLSFLKTIQEVAGYVLIALNTVERIPLENLQIIRGNMYYENSYALAVLSNYDANKTGLKELPMRNLQEILHGAVRFSNNPALCNVESIQWRDIVSSDFLSNMSMDFQNHLGSCQKCDPSCPNGSCWGAGEENCQKLTKIICAQQCSGRCRGKSPSDCCHNQCAAGCTGPRESDCLVCRKFRDEATCKDTCPPLMLYNPTTYQMDVNPEGKYSFGATCVKKCPRNYVVTDHGSCVRACGADSYEMEEDGVRKCKKCEGPCRKVCNGIGIGEFKDSLSINATNIKHFKNCTSISGDLHILPVAFRGDSFTHTPPLDPQELDILKTVKEITGFLLIQAWPENRTDLHAFENLEIIRGRTKQHGQFSLAVVSLNITSLGLRSLKEISDGDVIISGNKNLCYANTINWKKLFGTSGQKTKIISNRGENSCKATGQVCHALCSPEGCWGPEPRDCVSCRNVSRGRECVDKCNLLEGEPREFVENSECIQCHPECLPQAMNITCTGRGPDNCIQCAHYIDGPHCVKTCPAGVMGENNTLVWKYADAGHVCHLCHPNCTYGCTGPGLEGCPTNGPKIPSIATGMVGALLLLLVVALGIGLFMRRRHIVRKRTLRRLLQERELVEPLTPSGEAPNQALLRILKETEFKKIKVLGSGAFGTVYKGLWIPEGEKVKIPVAIKELREATSPKANKEILDEAYVMASVDNPHVCRLLGICLTSTVQLITQLMPFGCLLDYVREHKDNIGSQYLLNWCVQIAKGMNYLEDRRLVHRDLAARNVLVKTPQHVKITDFGLAKLLGAEEKEYHAEGGKVPIKWMALESILHRIYTHQSDVWSYGVTVWELMTFGSKPYDGIPASEISSILEKGERLPQPPICTIDVYMIMVKCWMIDADSRPKFRELIIEFSKMARDPQRYLVIQDAFIGFGGNVIRQQVKDNAKWYITDFVELLGELEE

SEQ ID NO: 12 - DNA, 21 bp, synthetic construct
  source 1..21: mol_type = other DNA; note = Description of Artificial Sequence: Synthetic primer
tccgagtccaggctgaaaatg

SEQ ID NO: 13 - protein, 52 aa, synthetic construct
  source 1..52: note = Description of Artificial Sequence: Synthetic polypeptide
  VARIANT 52: note = MOD_RES - Any amino acid
TSAIAKQEDVSVQLEALDIMADMLSRCTGPGLEGCPTNGPKIPSIATGMVGX

SEQ ID NO: 14 - DNA, 157 bp, synthetic construct
  source 1..157: mol_type = other DNA; note = Description of Artificial Sequence: Synthetic polynucleotide
ttacaagtgcaatagcaaaacaggaagatgtctctgttcagctagaagccttggatattatggctgatatgttgagcagatgcactgggccaggtcttgaaggctgtccaacgaatgggcctaagatcccgtccatcgccactgggatggtgggggc

SEQ ID NO: 15 - DNA, 24 bp, synthetic construct
  source 1..24: mol_type = other DNA; note = Description of Artificial Sequence: Synthetic oligonucleotide
  CDS 1..24
atgttgagcagatgcactgggcca

SEQ ID NO: 16 - protein, 8 aa, synthetic construct
  source 1..8: note = Description of Artificial Sequence: Synthetic peptide
MLSRCTGP

SEQ ID NO: 17-29 - skipped (13 entries)

SEQ ID NO: 30 - DNA, 20 bp, synthetic construct
  source 1..20: mol_type = other DNA; note = Description of Artificial Sequence: Synthetic primer
agcgatgcgaccctccggga

SEQ ID NO: 31 - DNA, 25 bp, synthetic construct
  source 1..25: mol_type = other DNA; note = Description of Artificial Sequence: Synthetic primer
tcttacgatgtttgtctttctttgt

SEQ ID NO: 32 - DNA, 23 bp, synthetic construct
  source 1..23: mol_type = other DNA; note = Description of Artificial Sequence: Synthetic primer
gggtgactgtttgggagttgatg

SEQ ID NO: 33 - DNA, 25 bp, synthetic construct
  source 1..25: mol_type = other DNA; note = Description of Artificial Sequence: Synthetic primer
tgtttgtctttctttgtatcggtgc

SEQ ID NO: 34 - DNA, 20 bp, synthetic construct
  source 1..20: mol_type = other DNA; note = Description of Artificial Sequence: Synthetic primer
gtgatgtctggagctacggg

SEQ ID NO: 35 - DNA, 21 bp, synthetic construct
  source 1..21: mol_type = other DNA; note = Description of Artificial Sequence: Synthetic primer
tgcctgatcacatttcctcca

SEQ ID NO: 36 - DNA, 23 bp, synthetic construct
  source 1..23: mol_type = other DNA; note = Description of Artificial Sequence: Synthetic primer
agttccgtgtcattgccatcaac

SEQ ID NO: 37 - DNA, 23 bp, synthetic construct
  source 1..23: mol_type = other DNA; note = Description of Artificial Sequence: Synthetic primer
tgtttcgtccttcttctccaccg

SEQ ID NO: 38 - DNA, 22 bp, synthetic construct
  source 1..22: mol_type = other DNA; note = Description of Artificial Sequence: Synthetic primer
ggaaaaaatgacatccagcgac

SEQ ID NO: 39 - DNA, 22 bp, synthetic construct
  source 1..22: mol_type = other DNA; note = Description of Artificial Sequence: Synthetic primer
tgggtgtaagaggctccacaag

SEQ ID NO: 40 - DNA, 24 bp, synthetic construct
  source 1..24: mol_type = other DNA; note = Description of Artificial Sequence: Synthetic primer
ggatgatagacgcagatagtcgcc

SEQ ID NO: 41 - DNA, 24 bp, synthetic construct
  source 1..24: mol_type = other DNA; note = Description of Artificial Sequence: Synthetic primer
tccagttgttttttctcttcctcg

SEQ ID NO: 42 - DNA, 24 bp, synthetic construct
  source 1..24: mol_type = other DNA; note = Description of Artificial Sequence: Synthetic primer
aagggagaggggaccagaaagaac

SEQ ID NO: 43 - DNA, 23 bp, synthetic construct
  source 1..23: mol_type = other DNA; note = Description of Artificial Sequence: Synthetic primer
gaaaggaagaggcaggcaaagac

SEQ ID NO: 44 - DNA, 24 bp, synthetic construct
  source 1..24: mol_type = other DNA; note = Description of Artificial Sequence: Synthetic primer
gcaatagcaaaacaggaagatgtc

SEQ ID NO: 45 - DNA, 21 bp, synthetic construct
  source 1..21: mol_type = other DNA; note = Description of Artificial Sequence: Synthetic primer
gaacacttacccattcgttgg

SEQ ID NO: 46-86 - skipped (41 entries)

SEQ ID NO: 87 - DNA, 20 bp, synthetic construct
  source 1..20: mol_type = other DNA; note = Description of Artificial Sequence: Synthetic primer
agaggtgaccaccaatcagc

SEQ ID NO: 88 - DNA, 20 bp, synthetic construct
  source 1..20: mol_type = other DNA; note = Description of Artificial Sequence: Synthetic primer
cgtgtcccacacagagacag

SEQ ID NO: 89 - DNA, 25 bp, synthetic construct
  source 1..25: mol_type = other DNA; note = Description of Artificial Sequence: Synthetic primer
ctacttcctatctcaccccaaaagg

SEQ ID NO: 90 - DNA, 20 bp, synthetic construct
  source 1..20: mol_type = other DNA; note = Description of Artificial Sequence: Synthetic primer
tcccacatctcagacaagca

SEQ ID NO: 91 - DNA, 21 bp, synthetic construct
  source 1..21: mol_type = other DNA; note = Description of Artificial Sequence: Synthetic primer
tcaatggtgatggtgatgatg

SEQ ID NO: 92 - DNA, 22 bp, synthetic construct
  source 1..22: mol_type = other DNA; note = Description of Artificial Sequence: Synthetic primer
gaaggtgaaggtcggagtcaac

SEQ ID NO: 93 - DNA, 22 bp, synthetic construct
  source 1..22: mol_type = other DNA; note = Description of Artificial Sequence: Synthetic primer
cagagttaaaagcagccctggt

SEQ ID NO: 94-8275 - skipped (8182 entries)

SEQ ID NO: 8276 - DNA, 3051 bp, synthetic construct
  source 1..3051: mol_type = other DNA; note = Description of Artificial Sequence: Synthetic polynucleotide
atgcgaccctccgggacggccggggcagcgctcctggcgctgctggctgcgctctgcccggcgagtcgggctctggaggaaaagaaagtttgccaaggcacgagtaacaagctcacgcagttgggcacttttgaagatcattttctcagcctccagaggatgttcaataactgtgaggtggtccttgggaatttggaaattacctatgtgcagaggaattatgatctttccttcttaaagaccatccaggaggtggctggttatgtcctcattgccctcaacacagtggagcgaattcctttggaaaacctgcagatcatcagaggaaatatgtactacgaaaattcctatgccttagcagtcttatctaactatgatgcaaataaaaccggactgaaggagctgcccatgagaaatttacaggaaatcctgcatggcgccgtgcggttcagcaacaaccctgccctgtgcaacgtggagagcatccagtggcgggacatagtcagcagtgactttctcagcaacatgtcgatggacttccagaaccacctgggcagctgccaaaagtgtgatccaagctgtcccaatgggagctgctggggtgcaggagaggagaactgccagaaactgaccaaaatcatctgtgcccagcagtgctccgggcgctgccgtggcaagtcccccagtgactgctgccacaaccagtgtgctgcaggctgcacaggcccccgggagagcgactgcctggtctgccgcaaattccgagacgaagccacgtgcaaggacacctgccccccactcatgctctacaaccccaccacgtaccagatggatgtgaaccccgagggcaaatacagctttggtgccacctgcgtgaagaagtgtccccgtaattatgtggtgacagatcacggctcgtgcgtccgagcctgtggggccgacagctatgagatggaggaagacggcgtccgcaagtgtaagaagtgcgaagggccttgccgcaaagtgtgtaacggaataggtattggtgaatttaaagactcactctccataaatgctacgaatattaaacacttcaaaaactgcacctccatcagtggcgatctccacatcctgccggtggcatttaggggtgactccttcacacatactcctcctctggatccacaggaactggatattctgaaaaccgtaaaggaaatcacagggtttttgctgattcaggcttggcctgaaaacaggacggacctccatgcctttgagaacctagaaatcatacgcggcaggaccaagcaacatggtcagttttctcttgcagtcgtcagcctgaacataacatccttgggattacgctccctcaaggagataagtgatggagatgtgataatttcaggaaacaaaaatttgtgctatgcaaatacaataaactggaaaaaactgtttgggacctccggtcagaaaaccaaaattataagcaacagaggtgaaaacagctgcaaggccacaggccaggtctgccatgccttgtgctcccccgagggctgctggggcccggagcccagggactgcgtctcttgccggaatgtcagccgaggcagggaatgcgtggacaagtgcaaccttctggagggtgagccaagggagtttgtggagaactctgagtgcatacagtgccacccagagtgcctgcctcaggccatgaacatcacctgcacaggacggggaccagacaactgtatccagtgtgcccactacattgacggcccccactgcgtcaagacctgcccggcaggagtcatgggagaaaacaacaccctggtctggaagtacgcagacgccggccatgtgtgccacctgtgccatccaaactgcacctacggatgcactgggccaggtcttgaaggctgtccaacgaatgggcctaagatcccgtccatcgccactgggatggtgggggccctcctcttgctgctggtggtggccctggggatcggcctcttcatgcgaaggcgccacatcgttcggaagcgcacgctgcggaggctgctgcaggagagggagcttgtggagcctcttacacccagtggagaagctcccaaccaagctctcttgaggatcttgaaggaaactgaattcaaaaagatcaaagtgctgggctccggtgcgttcggcacggtgtataagggactctggatcccagaaggtgagaaagttaaaattcccgtcgctatcaaggaattaagagaagcaacatctccgaaagccaacaaggaaatcctcgatgaagcctacgtgatggccagcgtggacaacccccacgtgtgccgcctgctgggcatctgcctcacctccaccgtgcagctcatcacgcagctcatgcccttcggctgcctcctggactatgtccgggaacacaaagacaatattggctcccagtacctgctcaactggtgtgtgcagatcgcaaagggcatgaactacttggaggaccgtcgcttggtgcaccgcgacctggcagccaggaacgtactggtgaaaacaccgcagcatgtcaagatcacagattttgggctggccaaactgctgggtgcggaagagaaagaataccatgcagaaggaggcaaagtgcctatcaagtggatggcattggaatcaattttacacagaatctatacccaccagagtgatgtctggagctacggggtgactgtttgggagttgatgacctttggatccaagccatatgacggaatccctgccagcgagatctcctccatcctggagaaaggagaacgcctccctcagccacccatatgtaccatcgatgtctacatgatcatggtcaagtgctggatgatagacgcagatagtcgcccaaagttccgtgagttgatcatcgaattctccaaaatggcccgagacccccagcgctaccttgtcattcaggatgctttcattggatttggaggaaatgtgatcaggcaacaagtcaaggataacgccaaatggtatatcactgattttgtagagctgctgggagaactggaagaa

SEQ ID NO: 8277 - DNA, 1584 bp, synthetic construct
  source 1..1584: mol_type = other DNA; note = Description of Artificial Sequence: Synthetic polynucleotide
atgggcgagaccatgtcaaagaggctgaagctccacctgggaggggaggcagaaatggaggaacgggcgttcgtcaaccccttcccggactacgaggccgccgccggggcgctgctcgcctccggagcggccgaagagacaggctgtgttcgtcccccggcgaccacggatgagcccggcctcccttttcatcaggacgggaagatcattcataatttcataagacggatccagaccaaaattaaagatcttctgcagcaaatggaagaagggctgaagacagctgatccccatgactgctctgcttatactggctggacaggcatagcccttttgtacctgcagttgtaccgggtcacatgtgaccaaacctacctgctccgatccctggattacgtaaaaagaacacttcggaatctgaatggccgcagggtcaccttcctctgtggggatgctggccccctggctgttggagctgtgatttatcacaaactcagaagtgactgtgagtcccaggaatgtgtcacaaaacttttgcagctccagagatcggttgtctgccaagaatcagaccttcctgatgagctgctttatggacgggcaggttatctgtatgccttactgtacctgaacacagagataggtccaggcaccgtgtgtgagtcagctattaaagaggtagtcaatgctattattgaatcgggtaagactttgtcaagggaagaaagaaaaacggagcgctgcccgctgttgtaccagtggcaccggaagcagtacgttggagcagcccatggcatggctggaatttactatatgttaatgcagccggcagcaaaagtggaccaagaaaccttgacagaaatggtgaaacccagtattgattatgtgcgccacaaaaaattccgatctgggaattacccatcatcattaagcaatgaaacagaccggctggtgcactggtgccacggcgccccgggggtcatccacatgctcatgcaggcgtacaaggggctgttaccctttgctgtggtagggagtacagatgaagtgaaagttggaaaaaggatggtcagaggccgtcactacccttggggagttttgcaagtggaaaatgaaaatcactgtgacttcgttaagctccgagatatgcttctttgtaccaatatggaaaatctaaaagaaaaaacccacactcagcactatgaatgttataggtaccaaaaactgcagaaaatgggctttacagatgtgggtccaaacaaccagccagttagttttcaagaaatctttgaagccaaaagacaagagttctatgatcaatgtcagagggaagaagaagagttgaaacagagatttatgcagcgagtcaaggagaaagaagcaacatttaaagaagctgaaaaagagctgcaggacaagttcgagcatcttaaaatgattcaacaggaggagataaggaagctcgaggaagagaaaaaacaactggaaggagaaatcatagatttttataaaatgaaagctgcctccgaagcactgcagactcagctgagcaccgatacaaagaaagacaaacatcgtaagaaa

SEQ ID NO: 8278 - DNA, 3123 bp, synthetic construct
  source 1..3123: mol_type = other DNA; note = Description of Artificial Sequence: Synthetic polynucleotide
atgcgaccctccgggacggccggggcagcgctcctggcgctgctggctgcgctctgcccggcgagtcgggctctggaggaaaagaaagtttgccaaggcacgagtaacaagctcacgcagttgggcacttttgaagatcattttctcagcctccagaggatgttcaataactgtgaggtggtccttgggaatttggaaattacctatgtgcagaggaattatgatctttccttcttaaagaccatccaggaggtggctggttatgtcctcattgccctcaacacagtggagcgaattcctttggaaaacctgcagatcatcagaggaaatatgtactacgaaaattcctatgccttagcagtcttatctaactatgatgcaaataaaaccggactgaaggagctgcccatgagaaatttacaggaaatcctgcatggcgccgtgcggttcagcaacaaccctgccctgtgcaacgtggagagcatccagtggcgggacatagtcagcagtgactttctcagcaacatgtcgatggacttccagaaccacctgggcagctgccaaaagtgtgatccaagctgtcccaatgggagctgctggggtgcaggagaggagaactgccagaaactgaccaaaatcatctgtgcccagcagtgctccgggcgctgccgtggcaagtcccccagtgactgctgccacaaccagtgtgctgcaggctgcacaggcccccgggagagcgactgcctggtctgccgcaaattccgagacgaagccacgtgcaaggacacctgccccccactcatgctctacaaccccaccacgtaccagatggatgtgaaccccgagggcaaatacagctttggtgccacctgcgtgaagaagtgtccccgtaattatgtggtgacagatcacggctcgtgcgtccgagcctgtggggccgacagctatgagatggaggaagacggcgtccgcaagtgtaagaagtgcgaagggccttgccgcaaagtgtgtaacggaataggtattggtgaatttaaagactcactctccataaatgctacgaatattaaacacttcaaaaactgcacctccatcagtggcgatctccacatcctgccggtggcatttaggggtgactccttcacacatactcctcctctggatccacaggaactggatattctgaaaaccgtaaaggaaatcacagggtttttgctgattcaggcttggcctgaaaacaggacggacctccatgcctttgagaacctagaaatcatacgcggcaggaccaagcaacatggtcagttttctcttgcagtcgtcagcctgaacataacatccttgggattacgctccctcaaggagataagtgatggagatgtgataatttcaggaaacaaaaatttgtgctatgcaaatacaataaactggaaaaaactgtttgggacctccggtcagaaaaccaaaattataagcaacagaggtgaaaacagctgcaaggccacaggccaggtctgccatgccttgtgctcccccgagggctgctggggcccggagcccagggactgcgtctcttgccggaatgtcagccgaggcagggaatgcgtggacaagtgcaaccttctggagggtgagccaagggagtttgtggagaactctgagtgcatacagtgccacccagagtgcctgcctcaggccatgaacatcacctgcacaggacggggaccagacaactgtatccagtgtgcccactacattgacggcccccactgcgtcaagacctgcccggcaggagtcatgggagaaaacaacaccctggtctggaagtacgcagacgccggccatgtgtgccacctgtgccatccaaactgcacctacggatgcactgggccaggtcttgaaggctgtccaacgaatgggcctaagatcccgtccatcgccactgggatggtgggggccctcctcttgctgctggtggtggccctggggatcggcctcttcatgcgaaggcgccacatcgttcggaagcgcacgctgcggaggctgctgcaggagagggagcttgtggagcctcttacacccagtggagaagctcccaaccaagctctcttgaggatcttgaaggaaactgaattcaaaaagatcaaagtgctgggctccggtgcgttcggcacggtgtataagggactctggatcccagaaggtgagaaagttaaaattcccgtcgctatcaaggaattaagagaagcaacatctccgaaagccaacaaggaaatcctcgatgaagcctacgtgatggccagcgtggacaacccccacgtgtgccgcctgctgggcatctgcctcacctccaccgtgcagctcatcacgcagctcatgcccttcggctgcctcctggactatgtccgggaacacaaagacaatattggctcccagtacctgctcaactggtgtgtgcagatcgcaaagggcatgaactacttggaggaccgtcgcttggtgcaccgcgacctggcagccaggaacgtactggtgaaaacaccgcagcatgtcaagatcacagattttgggctggccaaactgctgggtgcggaagagaaagaataccatgcagaaggaggcaaagtgcctatcaagtggatggcattggaatcaattttacacagaatctatacccaccagagtgatgtctggagctacggggtgactgtttgggagttgatgacctttggatccaagccatatgacggaatccctgccagcgagatctcctccatcctggagaaaggagaacgcctccctcagccacccatatgtaccatcgatgtctacatgatcatggtcaagtgctggatgatagacgcagatagtcgcccaaagttccgtgagttgatcatcgaattctccaaaatggcccgagacccccagcgctaccttgtcattcagctgcaggacaagttcgagcatcttaaaatgattcaacaggaggagataaggaagctcgaggaagagaaaaaacaactggaaggagaaatcatagatttttataaaatgaaagctgcctccgaagcactgcagactcagctgagcaccgatacaaagaaagacaaacatcgtaagaaa

SEQ ID NO: 8279 - DNA, 2853 bp, synthetic construct
  source 1..2853: mol_type = other DNA; note = Description of Artificial Sequence: Synthetic polynucleotide
atgggcgcccctgcctgcgccctcgcgctctgcgtggccgtggccatcgtggccggcgcctcctcggagtccttggggacggagcagcgcgtcgtggggcgagcggcagaagtcccgggcccagagcccggccagcaggagcagttggtcttcggcagcggggatgctgtggagctgagctgtcccccgcccgggggtggtcccatggggcccactgtctgggtcaaggatggcacagggctggtgccctcggagcgtgtcctggtggggccccagcggctgcaggtgctgaatgcctcccacgaggactccggggcctacagctgccggcagcggctcacgcagcgcgtactgtgccacttcagtgtgcgggtgacagacgctccatcctcgggagatgacgaagacggggaggacgaggctgaggacacaggtgtggacacaggggccccttactggacacggcccgagcggatggacaagaagctgctggccgtgccggccgccaacaccgtccgcttccgctgcccagccgctggcaaccccactccctccatctcctggctgaagaacggcagggagttccgcggcgagcaccgcattggaggcatcaagctgcggcatcagcagtggagcctggtcatggaaagcgtggtgccctcggaccgcggcaactacacctgcgtcgtggagaacaagtttggcagcatccggcagacgtacacgctggacgtgctggagcgctccccgcaccggcccatcctgcaggcggggctgccggccaaccagacggcggtgctgggcagcgacgtggagttccactgcaaggtgtacagtgacgcacagccccacatccagtggctcaagcacgtggaggtgaatggcagcaaggtgggcccggacggcacaccctacgttaccgtgctcaagtcctggatcagtgagagtgtggaggccgacgtgcgcctccgcctggccaatgtgtcggagcgggacgggggcgagtacctctgtcgagccaccaatttcataggcgtggccgagaaggccttttggctgagcgttcacgggccccgagcagccgaggaggagctggtggaggctgacgaggcgggcagtgtgtatgcaggcatcctcagctacggggtgggcttcttcctgttcatcctggtggtggcggctgtgacgctctgccgcctgcgcagcccccccaagaaaggcctgggctcccccaccgtgcacaagatctcccgcttcccgctcaagcgacaggtgtccctggagtccaacgcgtccatgagctccaacacaccactggtgcgcatcgcaaggctgtcctcaggggagggccccacgctggccaatgtctccgagctcgagctgcctgccgaccccaaatgggagctgtctcgggcccggctgaccctgggcaagccccttggggagggctgcttcggccaggtggtcatggcggaggccatcggcattgacaaggaccgggccgccaagcctgtcaccgtagccgtgaagatgctgaaagacgatgccactgacaaggacctgtcggacctggtgtctgagatggagatgatgaagatgatcgggaaacacaaaaacatcatcaacctgctgggcgcctgcacgcagggcgggcccctgtacgtgctggtggagtacgcggccaagggtaacctgcgggagtttctgcgggcgcggcggcccccgggcctggactactccttcgacacctgcaagccgcccgaggagcagctcaccttcaaggacctggtgtcctgtgcctaccaggtggcccggggcatggagtacttggcctcccagaagtgcatccacagggacctggctgcccgcaatgtgctggtgaccgaggacaacgtgatgaagatcgcagacttcgggctggcccgggacgtgcacaacctcgactactacaagaagacgaccaacggccggctgcccgtgaagtggatggcgcctgaggccttgtttgaccgagtctacactcaccagagtgacgtctggtcctttggggtcctgctctgggagatcttcacgctggggggctccccgtaccccggcatccctgtggaggagctcttcaagctgctgaaggagggccaccgcatggacaagcccgccaactgcacacacgacctgtacatgatcatgcgggagtgctggcatgccgcgccctcccagaggcccaccttcaagcagctggtggaggacctggaccgtgtccttaccgtgacgtccaccgacgtaaaggcgacacaggaggagaaccgggagctgaggagcaggtgtgaggagctccacgggaagaacctggaactggggaagatcatggacaggttcgaagaggttgtgtaccaggccatggaggaagttcagaagcagaaggaactttccaaagctgaaatccagaaagttctaaaagaaaaagaccaacttaccacagatctgaactccatggagaagtccttctccgacctcttcaagcgttttgagaaacagaaagaggtgatcgagggctaccgcaagaacgaagagtcactgaagaagtgcgtggaggattacctggcaaggatcacccaggagggccagaggtaccaagccctgaaggcccacgcggaggagaagctgcagctggcaaacgaggagatcgcccaggtccggagcaaggcccaggcggaagcgttggccctccaggccagcctgaggaaggagcagatgcgcatccagtcgctggagaagacagtggagcagaagactaaagagaacgaggagctgaccaggatctgcgacgacctcatctccaagatggagaagatc

SEQ ID NO: 8280 - DNA, 1584 bp, synthetic construct; identical to SEQ ID NO: 8277
  source 1..1584: mol_type = other DNA; note = Description of Artificial Sequence: Synthetic polynucleotide

SEQ ID NO: 8281 - DNA, 3123 bp, synthetic construct; identical to SEQ ID NO: 8278
  source 1..3123: mol_type = other DNA; note = Description of Artificial Sequence: Synthetic polynucleotide

SEQ ID NO: 8282 - DNA, 3150 bp, synthetic construct
  source 1..3150: mol_type = other DNA; note = Description of Artificial Sequence: Synthetic polynucleotide
atgggcgcccctgcctgcgccctcgcgctctgcgtggccgtggccatcgtggccggcgcctcctcggagtccttggggacggagcagcgcgtcgtggggcgagcggcagaagtcccgggcccagagcccggccagcaggagcagttggtcttcggcagcggggatgctgtggagctgagctgtcccccgcccgggggtggtcccatggggcccactgtctgggtcaaggatggcacagggctggtgccctcggagcgtgtcctggtggggccccagcggctgcaggtgctgaatgcctcccacgaggactccggggcctacagctgccggcagcggctcacgcagcgcgtactgtgccacttcagtgtgcgggtgacagacgctccatcctcgggagatgacgaagacggggaggacgaggctgaggacacaggtgtggacacaggggccccttactggacacggcccgagcggatggacaagaagctgctggccgtgccggccgccaacaccgtccgcttccgctgcccagccgctggcaaccccactccctccatctcctggctgaagaacggcagggagttccgcggcgagcaccgcattggaggcatcaagctgcggcatcagcagtggagcctggtcatggaaagcgtggtgccctcggaccgcggcaactacacctgcgtcgtggagaacaagtttggcagcatccggcagacgtacacgctggacgtgctggagcgctccccgcaccggcccatcctgcaggcggggctgccggccaaccagacggcggtgctgggcagcgacgtggagttccactgcaaggtgtacagtgacgcacagccccacatccagtggctcaagcacgtggaggtgaatggcagcaaggtgggcccggacggcacaccctacgttaccgtgctcaagtcctggatcagtgagagtgtggaggccgacgtgcgcctccgcctggccaatgtgtcggagcgggacgggggcgagtacctctgtcgagccaccaatttcataggcgtggccgagaaggccttttggctgagcgttcacgggccccgagcagccgaggaggagctggtggaggctgacgaggcgggcagtgtgtatgcaggcatcctcagctacggggtgggcttcttcctgttcatcctggtggtggcggctgtgacgctctgccgcctgcgcagcccccccaagaaaggcctgggctcccccaccgtgcacaagatctcccgcttcccgctcaagcgacaggtgtccctggagtccaacgcgtccatgagctccaacacaccactggtgcgcatcgcaaggctgtcctcaggggagggccccacgctggccaatgtctccgagctcgagctgcctgccgaccccaaatgggagctgtctcgggcccggctgaccctgggcaagccccttggggagggctgcttcggccaggtggtcatggcggaggccatcggcattgacaaggaccgggccgccaagcctgtcaccgtagccgtgaagatgctgaaagacgatgccactgacaaggacctgtcggacctggtgtctgagatggagatgatgaagatgatcgggaaacacaaaaacatcatcaacctgctgggcgcctgcacgcagggcgggcccctgtacgtgctggtggagtacgcggccaagggtaacctgcgggagtttctgcgggcgcggcggcccccgggcctggactactccttcgacacctgcaagccgcccgaggagcagctcaccttcaaggacctggtgtcctgtgcctaccaggtggcccggggcatggagtacttggcctcccagaagtgcatccacagggacctggctgcccgcaatgtgctggtgaccgaggacaacgtgatgaagatcgcagacttcgggctggcccgggacgtgcacaacctcgactactacaagaagacgaccaacggccggctgcccgtgaagtggatggcgcctgaggccttgtttgaccgagtctacactcaccagagtgacgtctggtcctttggggtcctgctctgggagatcttcacgctggggggctccccgtaccccggcatccctgtggaggagctcttcaagctgctgaaggagggccaccgcatggacaagcccgccaactgcacacacgacctgtacatgatcatgcgggagtgctggcatgccgcgccctcccagaggcccaccttcaagcagctggtggaggacctggaccgtgtccttaccgtgacgtccaccgactttaaggagtcggccttgaggaagcagtccttatacctcaagttcgaccccctcctgagggacagtcctggtagaccagtgcccgtggccaccgagaccagcagcatgcacggtgcaaatgagactccctcaggacgtccgcgggaagccaagcttgtggagttcgatttcttgggagcactggacattcctgtgccaggcccacccccaggtgttcccgcgcctgggggcccacccctgtccaccggacctatagtggacctgctccagtacagccagaaggacctggatgcagtggtaaaggcgacacaggaggagaaccgggagctgaggagcaggtgtgaggagctccacgggaagaacctggaactggggaagatcatggacaggttcgaagaggttgtgtaccaggccatggaggaagttcagaagcagaaggaactttccaaagctgaaatccagaaagttctaaaagaaaaagaccaacttaccacagatctgaactccatggagaagtccttctccgacctcttcaagcgttttgagaaacagaaagaggtgatcgagggctaccgcaagaacgaagagtcactgaagaagtgcgtggaggattacctggcaaggatcacccaggagggccagaggtaccaagccctgaaggcccacgcggaggagaagctgcagctggcaaacgaggagatcgcccaggtccggagcaaggcccaggcggaagcgttggccctccaggccagcctgaggaaggagcagatgcgcatccagtcgctggagaagacagtggagcagaagactaaagagaacgaggagctgaccaggatctgcgacgacctcatctccaagatggagaagatc

SEQ ID NO: 8283 - DNA, 3696 bp, synthetic construct
  source 1..3696: mol_type = other DNA; note = Description of Artificial Sequence: Synthetic polynucleotide
atggccaggcagccaccgccgccctgggtccatgcagccttcctcctctgcctcctcagtcttggcggagccatcgaaattcctatggatctgacgcagccgccaaccatcaccaagcagtcagcgaaggatcacatcgtggacccccgtgataacatcctgattgagtgtgaagcaaaagggaaccctgcccccagcttccactggacacgaaacagcagattcttcaacatcgccaaggacccccgggtgtccatgaggaggaggtctgggaccctggtgattgacttccgcagtggcgggcggccggaggaatatgagggggaatatcagtgcttcgcccgcaacaaatttggcacggccctgtccaataggatccgcctgcaggtgtctaaatctcctctgtggcccaaggaaaacctagaccctgtcgtggtccaagagggcgctcctttgacgctccagtgcaaccccccgcctggacttccatccccggtcatcttctggatgagcagctccatggagcccatcacccaagacaaacgtgtctctcagggccataacggagacctatacttctccaacgtgatgctgcaggacatgcagaccgactacagttgtaacgcccgcttccacttcacccacaccatccagcagaagaaccctttcaccctcaaggtcctcaccaaccacccttataatgactcgtccttaagaaaccaccctgacatgtacagtgcccgaggagttgcagaaagaacaccaagcttcatgtatccccagggcaccgcgagcagccagatggtgcttcgtggcatggacctcctgctggaatgcatcgcctccggggtcccaacaccagacatcgcatggtacaagaaaggtggggacctcccatctgataaggccaagtttgagaactttaataaggccctgcgtatcacaaatgtctctgaggaagactccggggagtatttctgcctggcctccaacaagatgggcagcatccggcacacgatctcggtgagagtaaaggctgctccctactggctggacgaacccaagaaccttattctggctcctggcgaggatgggagactggtgtgtcgagccaatggaaaccccaaacccactgtccagtggatggtgaatggggaacctttgcaatcggcaccacctaacccaaaccgtgaggtggccggagacaccatcatcttccgggacacccagatcagcagcagggctgtgtaccagtgcaacacctccaacgagcatggctacctgctggccaacgcctttgtcagtgtgctggatgtgccgcctcggatgctgtcgccccggaaccagctcattcgagtgattctttacaaccggacgcggctggactgccctttctttgggtctcccatccccacactgcgatggtttaagaatgggcaaggaagcaacctggatggtggcaactaccatgtttatgagaacggcagtctggaaattaagatgatccgcaaagaggaccagggcatctacacctgtgtcgccaccaacatcctgggcaaagctgaaaaccaagtccgcctggaggtcaaagaccccaccaggatctaccggatgcccgaggaccaggtggccagaaggggcaccacggtgcagctggagtgtcgggtgaagcacgacccctccctgaaactcaccgtctcctggctgaaggatgacgagccgctctatattggaaacaggatgaagaaggaagacgactccctgaccatctttggggtggcagagcgggaccagggcagttacacgtgtgtcgccagcaccgagctagaccaagacctggccaaggcctacctcaccgtgctagctgatcaggccactccaactaaccgtttggctgccctgcccaaaggacggccagaccggccccgggacctggagctgaccgacctggccgagaggagcgtgcggctgacctggatccccggggatgctaacaacagccccatcacagactacgtcgtccagtttgaagaagaccagttccaacctggggtctggcatgaccattccaagtaccccggcagcgttaactcagccgtcctccggctgtccccgtatgtcaactaccagttccgtgtcattgccatcaacgaggttgggagcagccaccccagcctcccatccgagcgctaccgaaccagtggagcaccccccgagtccaatcctggtgacgtgaagggagaggggaccagaaagaacaacatggagatcacgtggacgcccatgaatgccacctcggcctttggccccaacctgcgctacattgtcaagtggaggcggagagagactcgagaggcctggaacaacgtcacagtgtggggctctcgctacgtggtggggcagaccccagtctacgtgccctatgagatccgagtccaggctgaaaatgacttcgggaagggccctgagccagagtccgtcatcggttactccggagaagattacactaacagcacatctggagacccggtggagaagaaggacgaaacaccttttggggtctcggtggctgtgggcctggccgtctttgcctgcctcttcctttctacgctgctccttgtgctcaacaaatgtggacggagaaacaagtttgggatcaaccgcccggctgtgctggctccagaggatgggctggccatgtccctgcatttcatgacattgggtggcagctccctgtcccccaccgagggcaaaggctctgggctccaaggccacatcatcgagaacccacaatacttcagtgatgcctgtgttcaccacatcaagcgccgggacatcgtgctcaagtgggagctgggggagggcgcctttgggaaggtcttccttgctgagtgccacaacctcctgcctgagcaggacaagatgctggtggctgtcaaggcactgaaggaggcgtccgagagtgctcggcaggacttccagcgtgaggctgagctgctcaccatgctgcagcaccagcacatcgtgcgcttcttcggcgtctgcaccgagggccgccccctgctcatggtctttgagtatatgcggcacggggacctcaaccgcttcctccgatcccatggacctgatgccaagctgctggctggtggggaggatgtggctccaggccccctgggtctggggcagctgctggccgtggctagccaggtcgctgcggggatggtgtacctggcgggtctgcattttgtgcaccgggacctggccacacgcaactgtctagtgggccagggactggtggtcaagattggtgattttggcatgagcagggatatctacagcaccgactattaccgtgtgggaggccgcaccatgctgcccattcgctggatgccgcccgagagcatcctgtaccgtaagttcaccaccgagagcgacgtgtggagcttcggcgtggtgctctgggagatcttcacctacggcaagcagccctggtaccagctctccaacacggaggcaatcgactgcatcacgcagggacgtgagttggagcggccacgtgcctgcccaccagaggtctacgccatcatgcggggctgctggcagcgggagccccagcaacgccacagcatcaaggatgtgcacgcccggctgcaagccctggcccaggcacctcctgtctacctggatgtcctgggc

SEQ ID NO: 8284 - DNA, 3123 bp, synthetic construct; identical to SEQ ID NO: 8278
  source 1..3123: mol_type = other DNA; note = Description of Artificial Sequence: Synthetic polynucleotide

SEQ ID NO: 8285 - DNA, 3123 bp, synthetic construct; identical to SEQ ID NO: 8278
  source 1..3123: mol_type = other DNA; note = Description of Artificial Sequence: Synthetic polynucleotide

SEQ ID NO: 8286 - DNA, 1065 bp, synthetic construct
  source 1..1065: mol_type = other DNA; note = Description of Artificial Sequence: Synthetic polynucleotide
atgttcaagagaatggccgaatttgggcctgactccggcgggagagtaaagggtgttactatcgttaaaccaatagtttacggtaatgttgctcggtattttggaaagaaaagagaagaagatgggcacactcatcagtggacagtatatgtgaaaccatatagaaatgaggatatgtcagcatatgtgaagaaaatccagtttaaattacatgaaagctatggcaatcctttaagagttgttactaaacctccatatgaaattactgaaacaggatggggtgaattcgaaataatcatcaaaatatttttcattgaccctaatgaaagacctgtaaccctgtatcatttgctaaagctgtttcaatcagacaccaatgcaatgctggggaaaaagacagtggtttcagagttctatgatgaaatgatatttcaagacccaacagcaatgatgcaacaattattgacaacatctcgtcagctaacattaggagcctataagcatgaaacagaatatccatatgtcaaacttctgcttgatgctatgaaacactcaggttgtgctgttaacaaagatagacacttttcttgcgaagactgtaatggaaatgtcagtggaggttttgatgcttcaacatctcagatagttttgtgccagaataatatccataatcaggcccatatgaacagagtggtcacacacgagcttattcatgcatttgatcattgtcgtgcccatgtcgactggttcaccaacatcagacatttggcgtgctcagaggttcgagctgctaaccttagtggagactgctcacttgtcaatgaaatattcaggttacattttggattaaaacaacaccaccagacttgtgtgcgagacagagccactctttctatcctggctgttaggaatatcagcaaagaagtagctaaaaaggctgttgatgaagtttttgaatcttgtttcaatgaccatgaaccttttggaaggatcccacataacaagacttatgcaagatatgctcacagagactttgaaaaccgtgatcggtattattcaaatata

SEQ ID NO: 8287 - DNA, 2958 bp, synthetic construct
  source 1..2958: mol_type = other DNA; note = Description of Artificial Sequence: Synthetic polynucleotide
atgggcgcccctgcctgcgccctcgcgctctgcgtggccgtggccatcgtggccggcgcctcctcggagtccttggggacggagcagcgcgtcgtggggcgagcggcagaagtcccgggcccagagcccggccagcaggagcagttggtcttcggcagcggggatgctgtggagctgagctgtcccccgcccgggggtggtcccatggggcccactgtctgggtcaaggatggcacagggctggtgccctcggagcgtgtcctggtggggccccagcggctgcaggtgctgaatgcctcccacgaggactccggggcctacagctgccggcagcggctcacgcagcgcgtactgtgccacttcagtgtgcgggtgacagacgctccatcctcgggagatgacgaagacggggaggacgaggctgaggacacaggtgtggacacaggggccccttactggacacggcccgagcggatggacaagaagctgctggccgtgccggccgccaacaccgtccgcttccgctgcccagccgctggcaaccccactccctccatctcctggctgaagaacggcagggagttccgcggcgagcaccgcattggaggcatcaagctgcggcatcagcagtggagcctggtcatggaaagcgtggtgccctcggaccgcggcaactacacctgcgtcgtggagaacaagtttggcagcatccggcagacgtacacgctggacgtgctggagcgctccccgcaccggcccatcctgcaggcggggctgccggccaaccagacggcggtgctgggcagcgacgtggagttccactgcaaggtgtacagtgacgcacagccccacatccagtggctcaagcacgtggaggtgaatggcagcaaggtgggcccggacggcacaccctacgttaccgtgctcaagtcctggatcagtgagagtgtggaggccgacgtgcgcctccgcctggccaatgtgtcggagcgggacgggggcgagtacctctgtcgagccaccaatttcataggcgtggccgagaaggccttttggctgagcgttcacgggccccgagcagccgaggaggagctggtggaggctgacgaggcgggcagtgtgtatgcaggcatcctcagctacggggtgggcttcttcctgttcatcctggtggtggcggctgtgacgctctgccgcctgcgcagcccccccaagaaaggcctgggctcccccaccgtgcacaagatctcccgcttcccgctcaagcgacaggtgtccctggagtccaacgcgtccatgagctccaacacaccactggtgcgcatcgcaaggctgtcctcaggggagggccccacgctggccaatgtctccgagctcgagctgcctgccgaccccaaatgggagctgtctcgggcccggctgaccctgggcaagccccttggggagggctgcttcggccaggtggtcatggcggaggccatcggcattgacaaggaccgggccgccaagcctgtcaccgtagccgtgaagatgctgaaagacgatgccactgacaaggacctgtcggacctggtgtctgagatggagatgatgaagatgatcgggaaacacaaaaacatcatcaacctgctgggcgcctgcacgcagggcgggcccctgtacgtgctggtggagtacgcggccaagggtaacctgcgggagtttctgcgggcgcggcggcccccgggcctggactactccttcgacacctgcaagccgcccgaggagcagctcaccttcaaggacctggtgtcctgtgcctaccaggtggcccggggcatggagtacttggcctcccagaagtgcatccacagggacctggctgcccgcaatgtgctggtgaccgaggacaacgtgatgaagatcgcagacttcgggctggcccgggacgtgcacaacctcgactactacaagaagacgaccaacggccggctgcccgtgaagtggatggcgcctgaggccttgtttgaccgagtctacactcaccagagtgacgtctggtcctttggggtcctgctctgggagatcttcacgctggggggctccccgtaccccggcatccctgtggaggagctcttcaagctgctgaaggagggccaccgcatggacaagcccgccaactgcacacacgacctgtacatgatcatgcgggagtgctggcatgccgcgccctcccagaggcccaccttcaagcagctggtggaggacctggaccgtgtccttaccgtgacgtccaccgacgtgccaggcccacccccaggtgttcccgcgcctgggggcccacccctgtccaccggacctatagtggacctgctccagtacagccagaaggacctggatgcagtggtaaaggcgacacaggaggagaaccgggagctgaggagcaggtgtgaggagctccacgggaagaacctggaactggggaagatcatggacaggttcgaagaggttgtgtaccaggccatggaggaagttcagaagcagaaggaactttccaaagctgaaatccagaaagttctaaaagaaaaagaccaacttaccacagatctgaactccatggagaagtccttctccgacctcttcaagcgttttgagaaacagaaagaggtgatcgagggctaccgcaagaacgaagagtcactgaagaagtgcgtggaggattacctggcaaggatcacccaggagggccagaggtaccaagccctgaaggcccacgcggaggagaagctgcagctggcaaacgaggagatcgcccaggtccggagcaaggcccaggcggaagcgttggccctccaggccagcctgaggaaggagcagatgcgcatccagtcgctggagaagacagtggagcagaagactaaagagaacgaggagctgaccaggatctgcgacgacctcatctccaagatggagaagatc

SEQ ID NO: 8288 - DNA, 1095 bp, synthetic construct
  source 1..1095: mol_type = other DNA; note = Description of Artificial Sequence: Synthetic polynucleotide
atgcacgggggtggccccccctcgggggacagcgcatgcccgctgcgcaccatcaagagagtccagttcggagtcctgagtccggatgaactggtccctgtccttcgaatggtggaaggtgataccatctatgattactgctggtattctctgatgtcctcagcccagccagacacctcctacgtggccagcagcagccgggagaacccgattcatatctgggacgcattcactggagagctccgggcttcctttcgcgcctacaaccacctggatgagctgacggcagcccattcgctctgcttctccccggatggctcccagctcttctgtggcttcaaccggactgtgcgtgttttttccacggcccggcctggccgagactgcgaggtccgagccacatttgcaaaaaagcagggccagagcggcatcatctcctgcatagccttcagcccagcccagcccctctatgcctgtggctcctacggccgctccctgggtctgtatgcctgggatgatggctcccctctcgccttgctgggagggcaccaagggggcatcacccacctctgctttcatcccgatggcaaccgcttcttctcaggagcccgcaaggatgctgagctcctgtgctgggatctccggcagtctggttacccactgtggtccctgggtcgagaggtgaccaccaatcagcgcatctacttcgatctggacccgaccgggcagttcctagtgagtggcagcacgagcggggctgtctctgtgtgggacacggacgggcctggcaatgatgggaagccggagcccgtgttgagttttctgccccagaaggactgcaccaatggcgtgagcctgcaccctagcctgcctctcctggccactgcctccggtcagcgtgtgtttcctgagcccacagagagtggggacgaaggagaggagctgggccttcccttgctctccacgcgccacgtccaccttgaatgtcggcttcagctctggtggtgtgggggggcgccagactccagcatccctgatgatcaccagggcgagaaagggcagggaggaacggagggaggtgtgggtgagctgata

SEQ ID NO: 8289 - DNA, 3123 bp, synthetic construct; identical to SEQ ID NO: 8278
  source 1..3123: mol_type = other DNA; note = Description of Artificial Sequence: Synthetic polynucleotide

SEQ ID NO: 8290 - DNA, 465 bp, synthetic construct
  source 1..465: mol_type = other DNA; note = Description of Artificial Sequence: Synthetic polynucleotide
atggcggacttcgacacctacgacgatcgggcctacagcagcttcggcggcggcagagggtcccgcggcagtgctggtggccatggttcccgtagccagaaggagttgcccacagagcccccctacacagcatacgtaggaaatctacctttcaatacggttcagggcgacatagatgctatctttaaggatctcagcataaggagtgtacggctagtcagagacaaagacacagataaatttaaaggattctgctatgtagaattcgatgaagtggattcccttaaggaagccttgacatacgatggtgcactgttgggcgatcggtcacttcgtgtggacattgcagaaggcagaaaacaagataaaggtggctttggattcagaaaaggtggaccagatgacagagaaataaaagagactgatggaagctctcagatcaagcaagaaccagaccccacgtgg

SEQ ID NO: 8291 - DNA, 684 bp, synthetic construct
  source 1..684: mol_type = other DNA; note = Description of Artificial Sequence: Synthetic polynucleotide
atgttaaccatgagcgtgacactttcccccctgaggtcacaggacctggatcccatggctactgatgcttcacccatggccatcaacatgacacccactgtggagcagggtgagggagaagaggcaatgaaggacatggactctgaccagcagtatgaaaagccacccccactacacacaggggctgactggaagattgtcctccacttacctgaaattgagacctggctccggatgacctcagagagggtccgagacctaacctattcagtccagcaggattcggacagcaagcatgtggatgtacatctagttcaactaaaggcaatggtggcttgctatccgggaaatggaacaggttatgttcgccacgtggacaaccccaacggtgatggtcgctgcatcacctgcatctactatctgaacaagaattgggatgccaagctacatggtgggatcctgcggatatttccagaggggaaatcattcatagcagatgtggagcccatttttgacagactcctgttcttctggtcagatcgtaggaacccacacgaagtgcagccctcttacgcaaccagatatgctatgactgtctggtactttgatgctgaagaaagggcagaagccaaaaagaaattcaggaatttaactaggaaaactgaatctgccctcactgaagac

SEQ ID NO: 8292 - DNA, 984 bp, synthetic construct
  source 1..984: mol_type = other DNA; note = Description of Artificial Sequence: Synthetic polynucleotide
atggcgacggagggaggagggaaggagatgaacgagattaagacccaattcaccacccgggaaggtctgtacaagctgctgccgcactcggagtacagccggcccaaccgggtgcccttcaactcgcagggatccaaccctgtccgcgtctccttcgtaaacctcaacgaccagtctggcaacggcgaccgcctctgcttcaatgtgggccgggagctgtacttctatatctacaagggggtccgcaaggagattgaccccagcctgggcgtggcggagctgcctgacgagttcttcgaggaggacaacatgctgagcatgggcaagaagatgatgcaggaggccatgagcgcatttcccggcatcgatgaggccatgagctatgccgaggtcatgaggctggtgaagggcatgaacttctcggtggtggtatttgacacggcacccacgggccacaccctgaggctgctcaacttccccaccatcgtggagcggggcctgggccggcttatgcagatcaagaaccagatcagccctttcatctcacagatgtgcaacatgctgggcctgggggacatgaacgcagaccagctggcctccaagctggaggagacgctgcccgtcatccgctcagtcagcgaacagttcaaggaccctgagcagacaactttcatctgcgtatgcattgctgagttcctgtccctgtatgagacagagaggctgatccaggagctggccaagtgcaagattgacacacacaatataattgtcaaccagctcgtcttccccgaccccgagaagccctgcaagatgtgtgaggcccgtcacaagatccaggccaagtatctggaccagatggaggacctgtatgaagacttccacatcgtgaagctgccgctgttaccccatgaggtgcggggggcagacaaggtcaacaccttctcggccctcctcctggagccctacaagccccccagtgcccag

SEQ ID NO: 8293 - DNA, 993 bp, synthetic construct
  source 1..993: mol_type = other DNA; note = Description of Artificial Sequence: Synthetic polynucleotide
atggcggcggcggcggcggcgggcgcgggcccggagatggtccgcgggcaggtgttcgacgtggggccgcgctacaccaacctctcgtacatcggcgagggcgcctacggcatggtgtgctctgcttatgataatgtcaacaaagttcgagtagctatcaagaaaatcagcccctttgagcaccagacctactgccagagaaccctgagggagataaaaatcttactgcgcttcagacatgagaacatcattggaatcaatgacattattcgagcaccaaccatcgagcaaatgaaagatgtatatatagtacaggacctcatggaaacagatctttacaagctcttgaagacacaacacctcagcaatgaccatatctgctattttctctaccagatcctcagagggttaaaatatatccattcagctaacgttctgcaccgtgacctcaagccttccaacctgctgctcaacaccacctgtgatctcaaggccctgagcctgtgcaattatttcgagagtcaaaatgtggatttccgaggcaagaaggtgatcgaactgggtgcggggacaggcatcgtggggatcttggcagcgctgcaggggggggatgttaccatcactgacctgcccctggccctagaacagatccagggcaacgtccaggccaatgtgccagctggaggccaggcccaggtgcgtgccttgtcctgggggattgaccatcatgtcttccctgcaaactatgacctggtgctgggggctgatatcgtgtacctggaacccaccttccctctgctgctggggaccctccaacacctgtgcaggccccatggcaccatctatctggcctccaagatgagaaaggagcatgggacagagagcttctttcagcacctcctgccccagcatttccaactggagctggctcagcgggatgaggatgaaaatgtcaacatctatagggccaggcacagggaaccaagacctgct

SEQ ID NO: 8294 - DNA, 3765 bp, synthetic construct
  source 1..3765: mol_type = other DNA; note = Description of Artificial Sequence: Synthetic polynucleotide
atggcccagctgttcctgcccctgctggcagccctggtcctggcccaggctcctgcagctttagcagatgttctggaaggagacagctcagaggaccgcgcttttcgcgtgcgcatcgcgggcgacgcgccactgcagggcgtgctcggcggcgccctcaccatcccttgccacgtccactacctgcggccaccgccgagccgccgggctgtgctgggctctccgcgggtcaagtggactttcctgtcccggggccgggaggcagaggtgctggtggcgcggggagtgcgcgtcaaggtgaacgaggcctaccggttccgcgtggcactgcctgcgtacccagcgtcgctcaccgacgtctccctggcgctgagcgagctgcgccccaacgactcaggtatctatcgctgtgaggtccagcacggcatcgatgacagcagcgacgctgtggaggtcaaggtcaaaggggtcgtctttctctaccgagagggctctgcccgctatgctttctccttttctggggcccaggaggcctgtgcccgcattggagcccacatcgccaccccggagcagctctatgccgcctaccttgggggctatgagcaatgtgatgctggctggctgtcggatcagaccgtgaggtatcccatccagaccccacgagaggcctgttacggagacatggatggcttccccggggtccggaactatggtgtggtggacccggatgacctctatgatgtgtactgttatgctgaagacctaaatggagaactgttcctgggtgaccctccagagaagctgacattggaggaagcacgggcgtactgccaggagcggggtgcagagattgccaccacgggccaactgtatgcagcctgggatggtggcctggaccactgcagcccagggtggctagctgatggcagtgtgcgctaccccatcgtcacacccagccagcgctgtggtgggggcttgcctggtgtcaagactctcttcctcttccccaaccagactggcttccccaataagcacagccgcttcaacgtctactgcttccgagactcggcccagccttctgccatccctgaggcctccaacccagcctccaacccagcctctgatggactagaggctatcgtcacagtgacagagaccctggaggaactgcagctgcctcaggaagccacagagagtgaatcccgtggggccatctactccatccccatcatggaggacggaggaggtggaagctccactccagaagacccagcagaggcccctaggacgctcctagaatttgaaacacaatccatggtaccgcccacggggttctcagaagaggaaggtaaggcattggaggaagaagagaaatatgaagatgaagaagagaaagaggaggaagaagaagaggaggaggtggaggatgaggctctgtgggcatggcccagcgagctcagcagcccgggccctgaggcctctctccccactgagccagcagcccaggaggagtcactctcccaggcgccagcaagggcagtcctgcagcctggtgcatcaccacttcctgatggagagtcagaagcttccaggcctccaagggtccatggaccacctactgagactctgcccactcccagggagaggaacctagcatccccatcaccttccactctggttgaggcaagagaggtgggggaggcaactggtggtcctgagctatctggggtccctcgaggagagagcgaggagacaggaagctccgagggtgccccttccctgcttccagccacacgggcccctgagggtaccagggagctggaggccccctctgaagataattctggaagaactgccccagcagggacctcagtgcaggcccagccagtgctgcccactgacagcgccagccgaggtggagtggccgtggtccccgcatcaggtgactgtgtccccagcccctgccacaatggtgggacatgcttggaggaggaggaaggggtccgctgcctatgtctgcctggctatgggggggacctgtgcgatgttggcctccgcttctgcaaccccggctgggacgccttccagggcgcctgctacaagcacttttccacacgaaggagctgggaggaggcagagacccagtgccggatgtacggcgcgcatctggccagcatcagcacacccgaggaacaggacttcatcaacaaccggtaccgggagtaccagtggatcggactcaacgacaggaccatcgaaggcgacttcttgtggtcggatggcgtccccctgctctatgagaactggaaccctgggcagcctgacagctacttcctgtctggagagaactgcgtggtcatggtgtggcatgatcagggacaatggagtgacgtgccctgcaactaccacctgtcctacacctgcaagatggggctggtgtcctgtgggccgccaccggagctgcccctggctcaagtgttcggccgcccacggctgcgctatgaggtggacactgtgcttcgctaccggtgccgggaaggactggcccagcgcaatctgccgctgatccgatgccaagagaacggtcgttgggaggccccccagatctcctgtgtgcccagaagacctgtctcggtggctgtgggcctggccgtctttgcctgcctcttcctttctacgctgctccttgtgctcaacaaatgtggacggagaaacaagtttgggatcaaccgcccggctgtgctggctccagaggatgggctggccatgtccctgcatttcatgacattgggtggcagctccctgtcccccaccgagggcaaaggctctgggctccaaggccacatcatcgagaacccacaatacttcagtgatgcctgtgttcaccacatcaagcgccgggacatcgtgctcaagtgggagctgggggagggcgcctttgggaaggtcttccttgctgagtgccacaacctcctgcctgagcaggacaagatgctggtggctgtcaaggcactgaaggaggcgtccgagagtgctcggcaggacttccagcgtgaggctgagctgctcaccatgctgcagcaccagcacatcgtgcgcttcttcggcgtctgcaccgagggccgccccctgctcatggtctttgagtatatgcggcacggggacctcaaccgcttcctccgatcccatggacctgatgccaagctgctggctggtggggaggatgtggctccaggccccctgggtctggggcagctgctggccgtggctagccaggtcgctgcggggatggtgtacctggcgggtctgcattttgtgcaccgggacctggccacacgcaactgtctagtgggccagggactggtggtcaagattggtgattttggcatgagcagggatatctacagcaccgactattaccgtgtgggaggccgcaccatgctgcccattcgctggatgccgcccgagagcatcctgtaccgtaagttcaccaccgagagcgacgtgtggagcttcggcgtggtgctctgggagatcttcacctacggcaagcagccctggtaccagctctccaacacggaggcaatcgactgcatcacgcagggacgtgagttggagcggccacgtgcctgcccaccagaggtctacgccatcatgcggggctgctggcagcgggagccccagcaacgccacagcatcaaggatgtgcacgcccggctgcaagccctggcccaggcacctcctgtctacctggatgtcctgggc

SEQ ID NO: 8295 - DNA, 2718 bp, synthetic construct
  source 1..2718: mol_type = other DNA; note = Description of Artificial Sequence: Synthetic polynucleotide
atggatcaggtaatgcagtttgttgagccaagtcggcagtttgtaaaggactccattcggctggttaaaagatgcactaaacctgatagaaaagtgtgtaacggaataggtattggtgaatttaaagactcactctccataaatgctacgaatattaaacacttcaaaaactgcacctccatcagtggcgatctccacatcctgccggtggcatttaggggtgactccttcacacatactcctcctctggatccacaggaactggatattctgaaaaccgtaaaggaaatcacagggtttttgctgattcaggcttggcctgaaaacaggacggacctccatgcctttgagaacctagaaatcatacgcggcaggaccaagcaacatggtcagttttctcttgcagtcgtcagcctgaacataacatccttgggattacgctccctcaaggagataagtgatggagatgtgataatttcaggaaacaaaaatttgtgctatgcaaatacaataaactggaaaaaactgtttgggacctccggtcagaaaaccaaaattataagcaacagaggtgaaaacagctgcaaggccacaggccaggtctgccatgccttgtgctcccccgagggctgctggggcccggagcccagggactgcgtctcttgccggaatgtcagccgaggcagggaatgcgtggacaagtgcaaccttctggagggtgagccaagggagtttgtggagaactctgagtgcatacagtgccacccagagtgcctgcctcaggccatgaacatcacctgcacaggacggggaccagacaactgtatccagtgtgcccactacattgacggcccccactgcgtcaagacctgcccggcaggagtcatgggagaaaacaacaccctggtctggaagtacgcagacgccggccatgtgtgccacctgtgccatccaaactgcacctacggatgcactgggccaggtcttgaaggctgtccaacgaatgggcctaagatcccgtccatcgccactgggatggtgggggccctcctcttgctgctggtggtggccctggggatcggcctcttcatgcgaaggcgccacatcgttcggaagcgcacgctgcggaggctgctgcaggagagggagcttgtggagcctcttacacccagtggagaagctcccaaccaagctctcttgaggatcttgaaggaaactgaattcaaaaagatcaaagtgctgggctccggtgcgttcggcacggtgtataagggactctggatcccagaaggtgagaaagttaaaattcccgtcgctatcaaggaattaagagaagcaacatctccgaaagccaacaaggaaatcctcgatgaagcctacgtgatggccagcgtggacaacccccacgtgtgccgcctgctgggcatctgcctcacctccaccgtgcagctcatcacgcagctcatgcccttcggctgcctcctggactatgtccgggaacacaaagacaatattggctcccagtacctgctcaactggtgtgtgcagatcgcaaagggcatgaactacttggaggaccgtcgcttggtgcaccgcgacctggcagccaggaacgtactggtgaaaacaccgcagcatgtcaagatcacagattttgggctggccaaactgctgggtgcggaagagaaagaataccatgcagaaggaggcaaagtgcctatcaagtggatggcattggaatcaattttacacagaatctatacccaccagagtgatgtctggagctacggggtgactgtttgggagttgatgacctttggatccaagccatatgacggaatccctgccagcgagatctcctccatcctggagaaaggagaacgcctccctcagccacccatatgtaccatcgatgtctacatgatcatggtcaagtgctggatgatagacgcagatagtcgcccaaagttccgtgagttgatcatcgaattctccaaaatggcccgagacccccagcgctaccttgtcattcagggggatgaaagaatgcatttgccaagtcctacagactccaacttctaccgtgccctgatggatgaagaagacatggacgacgtggtggatgccgacgagtacctcatcccacagcagggcttcttcagcagcccctccacgtcacggactcccctcctgagctctctgagtgcaaccagcaacaattccaccgtggcttgcattgatagaaatgggctgcaaagctgtcccatcaaggaagacagcttcttgcagcgatacagctcagaccccacaggcgccttgactgaggacagcatagacgacaccttcctcccagtgcctgaatacataaaccagtccgttcccaaaaggcccgctggctctgtgcagaatcctgtctatcacaatcagcctctgaaccccgcgcccagcagagacccacactaccaggacccccacagcactgcagtgggcaaccccgagtatctcaacactgtccagcccacctgtgtcaacagcacattcgacagccctgcccactgggcccagaaaggcagccaccaaattagcctggacaaccctgactaccagcaggacttctttcccaaggaagccaagccaaatggcatctttaagggctccacagctgaaaatgcagaatacctaagggtcgcgccacaaagcagtgaatttattggagca

SEQ ID NO: 8296 - DNA, 891 bp, synthetic construct
  source 1..891: mol_type = other DNA; note = Description of Artificial Sequence: Synthetic polynucleotide
atgaggcagtctctcctattcctgaccagcgtggttcctttcgtgctggcgccgcgacctccggatgacccgggcttcggcccccaccagagactcgagaagcttgattctttgctctcagactacgatattctctctttatctaatatccagcagcattcggtaagaaaaagagatctacagacttcaacacatgtagaaacactactaactttttcagctttgaaaaggcattttaaattatacctgacatcaagtactgaacgtttttcacaaaatttcaaggtcgtggtggtggatggtaaaaacgaaagcgagtacactgtaaaatggcaggacttcttcactggacacgtggttggtgagcctgactctagggttctagcccacataagagatgatgatgttataatcagaatcaacacagatggggccgaatataacatagaggaattgttggataaatatttaatagccaatgcaactaatccagagagtaaggtcttctatctgaaaatgaagggtgattacttccggtaccttgctgaagttgcgtgtggtgatgatcgaaaacaaacgatagataattcccaaggagcttaccaagaggcatttgatataagcaagaaagagatgcaacccacacacccaatccgcctggggcttgctcttaacttttctgtattttactatgagattcttaataacccagagcttgcctgcacgctggctaaaacggcttttgatgaggccattgctgaacttgatacactgaatgaagactcatacaaagacagcaccctcatcatgcagttgcttagagacaacctaacactttggacatcagacagtgcaggagaagaatgtgatgcggcagaaggggctgaaaac

SEQ ID NO: 8297 - DNA, 762 bp, synthetic construct
  source 1..762: mol_type = other DNA; note = Description of Artificial Sequence: Synthetic polynucleotide
atggaggaagacggcgtccgcaagtgtaagaagtgcgaagggccttgccgcaaagtgtgtaacggaataggtattggtgaatttaaagactcactctccataaatgctacgaatattaaacacttcaaaaactgcacctccatcagtggcgatctccacatcctgccggtggcatttaggggtgactccttcacacatactcctcctctggatccacaggaactggatattctgaaaaccgtaaaggaaatcacagggtttttgctgattcaggcttggcctgaaaacaggacggacctccatgcctttgagaacctagaaatcatacgcggcaggaccaagcaacaggaccagacaactgtatccagtgtgcccactacattgacggcccccactgcgtcaagacctgcccggcaggagtcatgggagaaaacaacaccctggtctggaagtacgcagacgccggccatgtgtgccacctgtgccatccaaactgcacctacggatgcactgggccaggtcttgaaggctgtccaacgaatgggcctaagatcccgtccatcgccactgggatggtgggggccctcctcttgctgctggtggtggccctggggatcggcctcttcatgcgaaggcgccacatcgttcggaagcgcacgctgcggaggctgctgcaggagagggagatacaggtttgacccccgtctcatgttcagcaatcgcggcagtgtcaggactcgaagattttccaaacatcttctg

SEQ ID NO: 8298 - DNA, 843 bp, synthetic construct
  source 1..843: mol_type = other DNA; note = Description of Artificial Sequence: Synthetic polynucleotide
atggcggaccccggcccagatcccgaatctgagtcggaatcggtgttcccgcgggaggtcgggctctttgcagactcttactcggagaagagccagttctgtttctgtgggcatgtgctgaccatcacgcagaactttgggtcccgcctcggggtggcggcgcgcgtgtgggacgcggccctgagcctgtgcaattatttcgagagtcaaaatgtggatttccgaggcaagaaggtgatcgaactgggtgcggggacaggcatcgtggggatcttggcagcgctgcaggtggaactgtcaccgctgttcccagacacacttattctgggtctggagatccgggtgaaggtctcagactatgtacaagaccggattcgggccctacgcgcagctcctgcaggtggcttccagaacatcgcctgtctccgtagcaatgccatgaagcaccttcctaacttcttctacaagggccagctgacaaagatgttcttcctcttccccgacccacatttcaagcggacaaagcacaagtggcgaatcatcagtcccaccctgctagcagaatatgcctacgtgctaagagttggggggctggtgtataccataaccgatgtgctggagctacacgactggatgtgcactcatttcgaagagcacccactgtttgagcgtgtgcctctggaggacctgagtgaagaccccgttgtgggacatctaggcacctcaactgaggaggggaagaaagttctacgtaatggagggaagaatttcccagccatcttccgaagaatacaagatcccgtcctccaggcagtgacctcccaaaccagcctgcctggtcac

SEQ ID NO: 8299 - DNA, 735 bp, synthetic construct
  source 1..735: mol_type = other DNA; note = Description of Artificial Sequence: Synthetic polynucleotide
atggtcccggctgccggtcgacgaccgccccgcgtcatgcggctcctcggctggtggcaagtattgctgtgggtgctgggacttcccgtccgcggcgtggagggatacaatgtctctttgctatatgaccttgaaaatcttccggcatccaaggattccattgtgcatcaagctggcatgttgaagcgaaattgttttgcctctgtctttgaaaaatacttccaattccaagaagagggcaaggaaggagagaacagggcagttatccattatagggatgatgagaccatgtatgttgagtctaaaaaggacagagtcacagtagtcttcagcacagtgtttaaggatgacgacgatgtggtcattggaaaggtgttcatgcaggagttcaaagaaggacgcagagccagccacacagccccacaggtcctctttagccacagggaacctcctctggagctgaaagacacagacgccgctgtgggtgacaacattggctacattacctttgtgctgttccctcgtcacaccaatgccagtgctcgagacaacaccatcaacctgatccacacgttccgggactacctgcactaccacatcaagtgctctaaggcctatattcacacacgtatgcgggcgaaaacgtctgacttcctcaaggtgctgaaccgcgcacgcccagatgccgagaaaaaagaaatgaaaacaatcacggggaagacgttttcatcccgc

SEQ ID NO: 8300 - DNA, 1221 bp, synthetic construct
  source 1..1221: mol_type = other DNA; note = Description of Artificial Sequence: Synthetic polynucleotide
atggacggtttcgccggcagtctcggtacacttcatgttggtgatgaaattcgagaaatcaatggcatcagtgtggctaaccaaacagtggaacaactgcaaaaaatgcttagggaaatgcgggggagtattaccttcaagattgtgccaagttaccgcactcagtcttcgtcctgtgagagagattccccttccacttccagacagtccccagctaatggtcatagcagcactaacaattctgtttcggacttgccatcaactacccaaccaaaaggacgacagatctatgtaagagcacaatttgaatatgatccagccaaggatgacctcatcccctgtaaagaagctggcattcgattcagagttggtgacatcatccagattattagtaaggatgatcataattggtggcagggtaaactggaaaactccaaaaatggaactgcaggtctcattccttctcctgaacttcaggaatggcgagtagcttgcattgccatggagaagaccaaacaggagcagcaggccagctgtacttggtttggcaagaaaaagaagcagtacaaagataaatatttggcaaagcacaatgcagtgtttgatcaattagatcttgtcacatatgaagaagtagtaaaactgccagcattcaagaggaaaacactagtcttattaggcgcacatggtgttgggagaagacacataaaaaacactctcatcacaaagcacccagaccggtttgcgtaccctattccacatacaaccagacctccaaagaaagacgaagaaaatggaaagaattattactttgtatctcatgaccaaatgatgcaagacatctctaataacgagtacttggagtacggcagccacgaggatgcgatgtatgggacaaaactggagaccatccggaagatccacgagcaggggctgattgcaatactggacgtggagcctcaggcactgaaggtcctgagaactgcagagtttgctccttttgttgttttcattgctgcaccaactattactccaggtttaaatgaggatgaatctcttcagcgtctgcagaaggagtctgacatcttacagagaacatatgcacactacttcgatctcacaattatcaacaatgaaattgatgagacaatcagacatctggaggaagctgttgagctcgtgtgcacagccccacagtgggtccctgtctcctgggtctat

SEQ ID NO: 8301 - DNA, 306 bp, synthetic construct
  source 1..306: mol_type = other DNA; note = Description of Artificial Sequence: Synthetic polynucleotide
atgtccgggcagctggagcgttgcgagcgcgaatggcacgagctggagggagaatttcaagaactgcaggacatgaagaatgcaaccctctccctgaattctaatgacagtgagccaaaatattaccctatagcagttctgttgaaaaaccagaatcaggagctgcctgaggatgtaaaccctgccaaaaaggagaattacctctctgaacaggactttgtgtctgtgtttggcatcacaagagggcaatttgcagctctgcctggctggaaacagctccaaatgaagaaagaaaaggggcttttc

SEQ ID NO: 8302 - DNA, 3786 bp, synthetic construct
  source 1..3786: mol_type = other DNA; note = Description of Artificial Sequence: Synthetic polynucleotide
atgggtggcccacaggacaaggatgaacgcacaatcgcccttgtgaggccgtggccttgggggcaccaggccctggatccagcatatggcctggacacgatgcacccaagcaggcgcagcctccccttccctctgaactgtcagcttgcaagggttggaactgctgattatggaagtccctcggatcagagtgatcagcagctggactgtgccttggacctaatgaggcgcctgcctccccagcaaatcgagaaaaacctcagcgacctgatcgacctggatgtccccgttgaggccctcaccacggtgaagccatactgcaatgagatccatgcccaggctcaactgtggctcaagagagaccccaaggcatcctatgatgcctggaagaagtgtcttcctatcagagggatagatggcaatgggaaagcccccagcaaatcagagctccgccatctctatttgactgagaagtatgtgtggaggtggaaacagttcctgagtcgtcgggggaagaggacctcccccttggatctcaaactggggcataacaactggctgcgacaagtgcttttcactccagcaacgcaggccgcacggcaggcagcctgtaccattgtggaagctctagccaccattcccagccgcaagcagcaggtcctggacctgcttaccagttacctggatgagctgagcatagctggggagtgtgcagctgagtacctggctctctaccagaagctcatcacttctgcgcactggaaagtctacttggcagctcggggagtcctaccctatgtgggcaacctcatcaccaaggaaatagctcgtctgctggccctggaggaggctaccctgagtaccgatctgcagcagggttatgcccttaaaagtctcacaggccttctctcctcctttgttgaggtggaatccatcaaaagacattttaaaagtcgcttggtgggtactgtgctgaatggatacctgtgcttgcggaagctggtggtgcagaggaccaagctgatcgatgagacgcaggacatgctgctggagatgctggaggacatgaccacaggtacagaatcagaaaccaaggccttcatggctgtgtgcattgagacagccaagcgctacaatctggatgactaccggaccccggtgttcatcttcgagaggctctgcagcatcatttatcctgaggagaatgaagtcactgagttctttgtgaccctggagaaggatccccaacaagaagacttcttacagggcaggatgcctgggaacccgtatagcagcaatgagccaggcatcgggccgctgatgagggatataaagaacaagatttgccaggactgtgacttagtggccctcctggaagatgacagtggcatggagcttctagtgaacaataaaatcattagtttggaccttcctgtggctgaagtttacaagaaagtctggtgtaccacgaatgagggagagcccatgaggattgtttatcgtatgcgggggctgctgggcgatgccacagaggagttcattgagtccctggactctactacagatgaagaagaagatgaagaagaagtgtataaaatggctggtgtgatggcccagtgtgggggcctggaatgcatgcttaacagactcgcagggatcagagatttcaagcagggacgccaccttctaacagtgctactgaaattgttcagttactgcgtgaaggtgaaagtcaaccggcagcaactggtcaaactggaaatgaacaccttgaacgtcatgctggggaccctaaacctggcccttgtagctgaacaagaaagcaaggacagtgggggtgcagctgtggctgagcaggtgcttagcatcatggagatcattctagatgagtccaatgctgagcccctgagtgaggacaagggcaacctcctcctgacaggtgacaaggatcaactggtgatgctcttggaccagatcaacagcacctttgttcgctccaaccccagtgtgctccagggcctgcttcgcatcatcccgtacctttcctttggagaggtggagaaaatgcagatcttggtggagcgattcaaaccatactgcaactttgataaatatgatgaagatcacagtggtgatgataaagtcttcctggactgcttctgtaaaatagctgctggcatcaagaacaacagcaatgggcaccagctgaaggatctgattctccagaaggggatcacccagaatgcacttgactacatgaaaaagcacatccctagcgccaagaatttggatgccgacatctggaaaaagtttttgtctcgcccagccttgccatttatcctaaggctgcttcggggcctggccatccagcaccctggcacccaggttctgattggaactgattccatcccgaacctgcataagctggagcaggtgtccagtgatgagggcattgggaccttggcagagaacctgctggaagccctgcgggaacaccctgacgtaaacaagaagattgacgcagcccgcagggagacccgggcagagaagaagcgcatggccatggcaatgaggcagaaggccctgggcaccctgggcatgacgacaaatgaaaagggccaggtcgtgaccaagacagcactcctgaagcagatggaagagctgatcgaggagcctggcctcacgtgctgcatctgcagggagggatacaagttccagcccacaaaggtcctgggcatttataccttcacgaagcgggtagccttggaggagatggagaataagccccggaaacagcagggctacagcaccgtgtcccacttcaacattgtgcactacgactgccatctggctgccgtcaggttggctcgaggccgggaagagtgggagagtgccgccctgcagaatgccaacaccaagtgcaacgggctccttccggtctggggacctcatgtccctgaatcagcttttgccacttgcttggcaagacacaacacttacctccaggaatgtacaggccagcgggagcccacgtatcagctcaacatccatgacatcaaactgctcttcctgcgcttcgccatggagcagtcgttcagcgcagacactggcgggggcggccgggagagcaacatccacctgatcccgtacatcattcacactgtgctttacgtcctgaacacaacccgagcaacttcccgagaagagaagaacctccaaggctttctggaacagcccaaggagaagtgggtggagagtgcctttgaagtggacgggccctactatttcacagtcttggcccttcacatcctgccccctgagcagtggagagccacacgtgtggaaatcttgcggaggctgttggtgacctcgcaggctcgggcagtggctccaggtggagccaccaggctgacagataaggcagtgaaggactattccgcttaccgttcttcccttctcttttgggccctcgtcgatctcatttacaacatgtttaagaaacaaacaaccccaactgtgggagggattgacactggcagcctggagccttgtgtctgtgagaaggtgcctaccagtaacacagagggaggctggtcctgctctctcgctgagtacatccgccacaacgacatgcccatctacgaagctgccgacaaagccctgaaaaccttccaggaggagttcatgccagtggagaccttctcagagttcctcgatgtggccggtcttttatcagaaatcaccgatccagagagcttcctgaaggacctgttgaactcagtcccc

SEQ ID NO: 8303 - DNA, 2544 bp, synthetic construct
  source 1..2544: mol_type = other DNA; note = Description of Artificial Sequence: Synthetic polynucleotide
atgaacggacagttggatctaagtgggaagctaatcatcaaagctcaacttggggaggatattcggcgaattcctattcataatgaagatattacttatgatgaattagtgctaatgatgcaacgagttttcagaggaaaacttctgagtaatgatgaagtaacaataaagtataaagatgaagatggagatcttataacaatttttgatagttctgacctttcctttgcaattcagtgcagtaggatactgaaactgacattatttggaaaatctacttcctcatcaagcacccctacagagttctgcaggaatggtggaacctgggaaaatggcagatgtatttgtacagaagagtggaaaggactgagatgtacaattgctaatttttgtgaaaatagtacctatatgggttttacttttgccagaatcccagtgggcagatatggaccatccttgcaaacatgtggcaaggatactccaaatgcgggcaatccaatggcagtccggttgtgcagtctctctctatatggagagatagaattacaaaaagtgacaataggaaattgcaatgaaaatctggaaaccctggaaaagcaggtaaaggatgtcacagcaccacttaataacatttcttctgaagtccagattttaacatctgatgccaataaattaactgctgagaacatcactagtgctacgcgagtggttggacagatattcaacacttccagaaatgcttcacctgaggcaaagaaagttgccatagtaacagtgagtcaactcctagatgccagtgaagatgcttttcaaagagttgctgctactgctaatgatgatgcccttacaacgcttattgagcaaatggagacttattccttgtctttgggtaatcaatcagtggtggaacctaacatagcaatacagtcagcaaatttctcttcagaaaatgcggtggggccttcaaatgttcgcttctctgtgcagaaaggagctagcagttctctagtttctagttcaacatttatacatacaaatgtggatggccttaacccagatgcacagactgagcttcaggtcttgcttaatatgacgaaaaattacaccaagacatgcggctttgtagtttatcaaaatgacaagcttttccaatcaaaaacttttacagctaaatcggattttagtcaaaaaattatctcaagcaaaactgatgaaaatgagcaagatcagagtgcttctgttgacatggtctttagtccaaagtacaaccaaaaagaatttcaactctattcctatgcctgtgtctattggaatttgtcagcgaaggactgggacacatatggctgtcaaaaagacaagggcactgatggattcctgcgctgccgctgcaaccatactactaattttgctgtattaatgactttcaaaaaggattatcaatatcccaaatcacttgacatattatccaacgttggatgtgcactgtctgttactggtctggctctcacagttatatttcagattgtcaccaggaaagtcagaaaaacctcagtaacctgggttttggtcaatctgtgcatatcaatgttgattttcaacctcctctttgtgtttggaattgaaaactccaataagaacttgcagacaagtgatggtgacatcaataatattgactttgacaataatgacatacccaggacagacaccattaacatcccgaatcccatgtgcactgcgattgccgccttactgcactattttctgttagtgacatttacctggaacgcactcagcgctgcacagctctattaccttctaataaggaccatgaagcctcttcctcggcatttcattcttttcatctcattaattggatggggagtcccagctatagtagtggctataacagtgggagttatttattctcagaatggaaataatccacagtgggaattagactaccggcaagagaaaatctgctggctggcaattccagaacccaatggtgttataaaaagtccgctgttgtggtcattcatcgtacctgtaaccattatcctcatcagcaatgttgttatgtttattacaatctcgatcaaagtgctgtggaagaataaccagaacctgacaagcacaaaaaaagtttcatccatgaagaagattgttagcacattatctgttgcagttgtttttggaattacctggattctagcatacctgatgctagttaatgatgatagcatcaggatcgtcttcagctacatattctgccttttcaacactacacagggattgcaaatttttatcctgtacactgttagaacaaaagtcttccagagtgaagcttccaaagtgttgatgttgctatcgtctattgggagaaggaagtcattgccttcagtgacgcggccgaggctgcgtgtaaagatgtataatttcctcaggtcattgccaaccttacatgaacgctttaggctactggaaacctctccgagtactgaggaaatcacactctctgaaagtgacaatgcaaaggaaagcatc

SEQ ID NO: 8304 - DNA, 330 bp, synthetic construct
  source 1..330: mol_type = other DNA; note = Description of Artificial Sequence: Synthetic polynucleotide
atggcccccgcccgtctgttcgcgctgctgctgttcttcgtaggcggagtcgccgagtcggattacaagggccagaagctagctgaacagatgtttcagggaattattcttttttctgcaatagttggatttatctacgggtacgtggctgaacagttcgggtggactgtctatatagttatggccggatttgctttttcatgtttgctgacacttcctccatggcccatctatcgccggcatcctctcaagtggttacctgttcaagaatcaagcacagacgacaagaaaccaggggaaagaaaaattaagaggcatgctaaaaataat

SEQ ID NO: 8305 - DNA, 3363 bp, synthetic construct
  source 1..3363: mol_type = other DNA; note = Description of Artificial Sequence: Synthetic polynucleotide
atgcgctccattaggaagaggtggacgatctgcacaataagtctgctcctgatcttttataagacaaaagaaatagcaagaactgaggagcaccaggagacgcaactcatcggagatggtgaattgtctttgagtcggtcacttgtcaatagctctgataaaatcattcgaaaggctggctcttcaatcttccagcacaatgtagaaggttggaaaatcaattcctctttggtcctagagataaggaagaacatacttcgtttcttagatgcagaacgagatgtgtcagtggtcaagagcagttttaagcctggtgatgtcatacactatgtgcttgacaggcgccggacactaaacatttctcatgatctacatagcctcctacctgaagtttcaccaatgaagaatcgcaggtttaagacctgtgcagttgttggaaattctggcattctgttagacagtgaatgtggaaaggagattgacagtcacaattttgtaataaggtgtaatctagctcctgtggtggagtttgctgcagatgtgggaactaaatcagattttattaccatgaatccatcagttgtacaaagagcatttggaggctttcgaaatgagagtgacagagaaaaatttgtgcatagactttccatgctgaatgacagtgtcctttggattcctgctttcatggtcaaaggaggagagaagcacgtggagtgggttaatgcattaatccttaagaataaactgaaagtgcgaactgcctatccgtcattgagacttattcatgctgtcagagggttttgtgatgaaggaacctgtacagataaagccaatattctgtatgcctgggcgagaaatgctccccctacccggctccccaaaggtgttggattcagagttggaggagagactggaagtaaatactttgtactacaggtacactatggggatattagtgcttttagagataataacaaggactgttctggtgtgtccttacacctcacacgtctgccacagcctttaattgctggcatgtaccttatgatgtctgttgacactgttatcccagcaggagaaaaagtggtgaattctgacatttcatgccattataaaaattatccaatgcatgtctttgcctatagagttcacactcaccatttaggtaaggtagtaagtggatacagagtaagaaatggacagtggacactgattggacggcagagccctcagctgccacaggctttctaccctgtggggcatccagttgatgtaagttttggtgacctactggctgcaagatgtgtattcactggtgaaggaaggacagaagccacacacattggtggcacgtctagtgatgaaatgtgcaacttatacattatgtattacatggaagccaagcatgcagtttctttcatgacctgtacccagaatgtagctccagatatgttcagaaccataccaccagaggccaacattccaattcccgtgaagtctgatatggttatgatgcatgaacatcataaagaaacagaatataaagataagattcctttactacagcagccaaaacgagaagaagaagaagtgttagaccagggtgatttctattcactactttccaagctgctaggagaaagggaagatgttgttcatgtgcacaaatataatcctacagaaaaggcagaatcagagtcagacctggtagctgagattgcaaatgtagtccaaaaaaaggatcttggtcgatctgatgccagagagggtgcagaacatgagaggggtaatgctattcttgtcagagacagaattcacaaattccacagactagtatctaccttgaggccaccagagagcagagttttctcattacagcagcccccacctggtgaaggcacctgggaaccagaacacacaggagatttccacatggaagaggcactggattggcctggagtatacttgttaccaggccaggtttctggggtggctctagaccctaagaataacctggtgattttccacagaggtgaccatgtctgggatggaaactcgtttgacagcaagtttgtttaccagcaaataggactcggaccaattgaagaagacactattcttgtcatagatccaaataatgctgcagtactccagtccagtggaaaaaatctgttttacttgccacatggcttgagtatagataaagatgggaattattgggtcacagacgtggctctccatcaggtgttcaaactggatccaaacaataaagaaggccctgtattaatcctgggaaggagcatgcaaccaggcagtgaccagaatcacttctgtcaacccactgatgtggctgtggatccaggcactggagccatttatgtatcagatggttactgcaacagcaggattgtgcagttttcaccaagtggaaagttcatcacacagtggggagaagagtcttcagggagcagtcctctgccaggccagttcactgttcctcacagcttggctcttgtgcctcttttgggccaattatgtgtggcagaccgggaaaatggtcggatccagtgttttaaaactgacaccaaagaatttgtgagagagattaagcattcatcatttggaagaaatgtatttgcaatttcatatataccaggcttgctctttgcagtgaatgggaagcctcattttggggaccaagaacctgtacaaggatttgtgatgaacttttccaatggggaaattatagacatcttcaagccagtgcgcaagcactttgatatgcctcatgatattgttgcatctgaagatgggactgtgtacattggagatgctcataccaacaccgtgtggaagttcaccttgactgagaaattggaacatcgatcagttaaaaaggctggcattgaggtccaggaaatcaaagaagccgaggcagttgttgaaaccaaaatggagaacaaacccacctcctcagaattgcagaagatgcaagagaaacagaaactgatcaaagagccaggctcgggagtgcctgttgttctcattacaacccttctggttattccggtggttgtcctgctggccattgccatatttattcggtggaaaaaatcaagggcctttggagcagattctgaacacaaactcgagacgagttcaggaagagtactgggaagatttagaggaaagggaagtggaggcttaaaccttggtaatttctttgcaagccgtaagggctacagtcgaaaagggtttgaccggcttagcactgagggcagtgaccaagagaaagaggatgatggaagtgaatcagaagaggagtattcagcacctctgcctgcgctcgcaccttcctcctcc

SEQ ID NO: 8306 - DNA, 564 bp, synthetic construct
  source 1..564: mol_type = other DNA; note = Description of Artificial Sequence: Synthetic polynucleotide
atgtcagtggacatgaatagccaggggtctgacagcaatgaagaggactatgacccaaattgtgaggaagaggaagaagaagaagaagacgaccctggggacatagaggactattacgtgggagtagccagcgatgtggagcagcagggggctgatgcctttgatcccgaggagtaccagttcacttgcttgacctacaaggaatctgagggtgccctcaatgagcacatgaccagcttagcttctgtcctaaaggatggggacccagacacgccaaagcctgtgagcttcacagtgaaggagacagtgtgccccaggacgacacagcagtcaccagaggattgtgacttcaagaaggacgggctggtgaagcggtgtatggggacagtgaccctcaaccaggccaggggctcctttgacatcagttgtgataaggataacaagagatttgccctgctgggtgatttcttccggaaatctaaagagaagattggcaaagagtttaaaagaattgtccagagaatcaaggattttttgcggaatcttgtacccaggacagagtcc

SEQ ID NO: 8307 - DNA, 2778 bp, synthetic construct
  source 1..2778: mol_type = other DNA; note = Description of Artificial Sequence: Synthetic polynucleotide
atgagccggggcgcgggcgcgcttcagcgccggacaacgacctacctcatctcgctgaccctggttaagctcgagtcggtgcctccgccgccgccttctccgtctgcggccgcggccggcgccgccggtgccagaggctccgagactggggatcctggcagcccccgaggcgcggaggagccgggcaagaagcggcacgaacgtctcttccaccggcaggatgcgctgtggatcagcacgagcagcgcgggcaccgggggcgcggagcccccagccctgtccccggctccggccagtccggcccgcccagtctcccccgctcccggccgccgcctctccctctgggccgtccctccgggacccccgctctccgggggactgagccccgaccccaagcctgggggcgcccccacctcctcccggcgccccctgctcagcagcccgagctggggcggcccggagcccgaaggccgggcgggcggcggcatccctggctcatcctctccgcaccctggcaccggcagccggaggctcaaggtggcgcctcctccgccggctcccaagccttgcaagaccgtgaccacgagtggagccaaagccggcgggggcaagggcgcgggtagccgcctgtcatggcccgaaagcgagggcaagcccagggtcaaggggtcaaagagcagcgccgggactggagcttcggtctctgccgccgccaccgccgccgccgccgggggagggggctctacagcttcgacctctggtggggtcggggctggggctggagcccgagggaagttgtcccctcggaaaggcaagagtaagaccttggacaacagtgacttgcatccgggaccgcctgccggctctcctcctccgctaaccctcccaccaactccgagtccagccactgctgtcaccgctgcttccgcgcagccccccgggcctgcacctccaatcactctggagcctccagctccggggctgaaacggggccgggaggggggccgagcatccactcgtgaccgcaagatgctcaagtttatcagcggcatcttcaccaagagcacaggagggcctcctggctccgggccccttcccggaccccccagcctgtcttctggcagcgggtccagggagctgctgggcgccgagctccgcgcttcccctaaggctgtgatcaatagccaggaatggactttgagccgctccattcctgaactgcgcctgggtgtgctgggcgatgccaggagtgggaagtcatcgctcatccaccgattcctgactggctcataccaggtgctggagaagacagagagtgagcagtacaagaaagaaatgttggtggatggacagacacatctggtgctaatccgagaggaagctggggcacctgatgccaagttctcaggctgggcagatgctgtgatcttcgtcttcagcctggaggatgagaacagtttccaggctgtgagccgtctccatgggcagctgagttcccttcgcggggagggacgaggaggcctggccttggcactggtggggacacaagacaggatcagtgcttcctcccctcgggtggtgggagatgctcgtgccagagctctgtgcgcggacatgaaacgctgcagctactatgagacttgtgcaacctatgggctcaatgtggatcgggtcttccaggaggtggcccagaaggtggtgaccttgcgcaagcagcaacagcttctggctgcctgcaagtccctgcccagctccccaagccactcagctgcatccactccggtagctggccaggctagtaacgggggccacactagcgactactcttcttccctcccgtcctcaccgaatgttggtcaccgggagctccgagccgaggcagctgcagtggctggattgagcaccccagggtccctgcaccgggcagccaagcgcaggaccagcctttttgcgaatcgtcggggtagtgactccgagaaacgaagcttggatagtcggggagagacaacagggagtgggcgagccatccccatcaaacagagcttcctactaaaacgaagtggcaattccttgaacaaagaatggaagaagaaatatgtaaccctgtccagtaatggctttctactctaccaccccagtattaacgattacatccacagtacccacggcaaggagatggacttgctgcgaacaacagtcaaagtcccgggcaagcggcccccgagggccatctctgcctttggcccctcagccagcattaacgggctcgtcaaggacatgagcactgtccagatgggtgaaggcctggaagccactactcccatgccaagccctagccccagccccagttccctgcagccaccaccagatcagacatccaaacacctgctgaagccagaccggaatttggcccgagccctcagcacggactgtaccccatctggagacctgagccccctgagtcgggaaccccctccttctcccatggtgaagaagcagaggaggaaaaaattgacaacaccatccaagactgaaggctcggctgggcaggctgaagatgaaggttattctttcagcagtgtcctgtattatggaaatgaagctactcttcttatttttgatctgctgttcttctgtgttgtggatttggcttgccaaaattttattttagcatccttccttacatatctacaacaagagatttttagatatatccgtaatacagtaggacaaaagaatttggcatccaaaacattggtggatcaaagatttttgatt

SEQ ID NO: 8308 - DNA, 285 bp, synthetic construct
  source 1..285: mol_type = other DNA; note = Description of Artificial Sequence: Synthetic polynucleotide
atgacccacttcaacaagggcccttcctatgggctctcggccgaagtcaagaacaaggtgttgtgtaacggaccaggaacatgtgttcctatctgtgtatctgcccttctccttgggatactaggaataaagaaagtgatcattgtctacgttgaaagcatctgccgtgtagaaacgttatccatgtccggaaagattctgtttcatctctcagattacttcattgttcagtggccggctctgaaagaaaagtatcccaaatcggtgtaccttgggcgaattgtt

SEQ ID NO: 8309 - DNA, 195 bp, synthetic construct
  source 1..195: mol_type = other DNA; note = Description of Artificial Sequence: Synthetic polynucleotide
atgaggcgccagcctgcgaaggtggcggcgctgctgctcgggctgctcttggagcatattgaaggtgatgacctgcatatccagaggaatgtgcaaaagctgaaggacacagtgaaaaagcttggagagagtggagagatcaaagcaattggagaactggatttgctgtttatgtctctgagaaatgcctgcatt

SEQ ID NO: 8310 - DNA, 1020 bp, synthetic construct
  source 1..1020: mol_type = other DNA; note = Description of Artificial Sequence: Synthetic polynucleotide
atgcgaccctccgggacggccggggcagcgctcctggcgctgctggctgcgctctgcccggcgagtcgggctctggaggaaaagaaagctgacatagcccagagatacaggataagcaaatacccaaccctcaaattgtttcgtaatgggatgatgatgaagagagaatacaggggtcagcgatcagtgaaagcattggcagattacatcaggcaacaaaaaagtgaccccattcaagaaattcgggacttagcagaaatcaccactcttgatcgcagcaaaagaaatatcattggatattttgagcaaaaggactcggacaactatagagtttttgaacgagtagcgaatattttgcatgatgactgtgcctttctttctgcatttggggatgtttcaaaaccggaaagatatagtggcgacaacataatctacaaaccaccagggcattctgctccggatatggtgtacttgggagctatgacaaattttgatgtgacttacaattggattcaagataaatgtgttcctcttgtccgagaaataacatttgaaaatggagaggaattgacagaagaaggactgccttttctcatactctttcacatgaaagaagatacagaaagtttagaaatattccagaatgaagtagctcggcaattaataagtgaaaaaggtacaataaactttttacatgccgattgtgacaaatttagacatcctcttctgcacatacagaaaactccagcagattgtcctgtaatcgctattgacagctttaggcatatgtatgtgtttggagacttcaaagatgtattaattcctggaaaactcaagcaattcgtatttgacttacattctggaaaactgcacagagaattccatcatggacctgacccaactgatacagccccaggagagcaagcccaagatgtagcaagcagtccacctgagagctccttccagaaactagcacccagtgaatataggtatactctattgagggatcgagatgagctt

SEQ ID NO: 8311 - DNA, 1836 bp, synthetic construct
  source 1..1836: mol_type = other DNA; note = Description of Artificial Sequence: Synthetic polynucleotide
atgactgatggaaaactctccacctctacaaatggcgtagccttcatgggtattctggatggtcgaccaggaaacccccttcagaacctgcaacacgtcaatctcaaggcgccccgactcctctccgcgcctgagtacgggcccaagctgaaactcagggctttagaagaccggcacagcctccagtccgtggactcggggattcctaccctggagatcgggaacccggagcctgtaccctgcagcgcggtccacgtgaggaggaagcagtccgactccgacctcatccccgagcgggccttccagagcgcctgcgcgctgccatcctgtgcgccaccagctcctagcagcaccgagcgggaacagagcgtgcgcaaatcctccacgtttcccaggacaggctatgactcggtaaagctctatagcccgacctccaaagccctgacccgcagcgatgatgtctccgtctgcagcgtgtccagtcttgggacagagctgtccaccacgctgtccgtcagcaatgaggacatcttggaccttgtggtcacgagcagctccagtgccattgtgaccctggagaatgacgatgacccacagtttaccaacgtcaccttgagctctatcaaggaaacccgtggcttacaccagcaggactgtgttcatgaagctgaggaggggagtaaattgaaaatattggggccatttagtaacttctttgcaaggaacttgcttgctagaaaacaaagtgcaaggcttgacaaacacaatgacttgggatggaagttatttgggaaagcgccactccgagagaatgcccagaaggattcaaagagaatacagaaggaatatgaagacaaggctggaagacctagcaagccaccctctccaaagcagaatgtgaggaagaatcttgactttgaaccactttccaccaccgcactcatcctcgaggacagaccagcacacccgctgtttggccgcaacgtgcccctgtccagcggttctggcttcatcatgtcagaggccggcctgatcatcaccaatgcccacgtggtgtccagcaacagtgctgccccgggcaggcagcagctcaaggtgcagctacagaatggggactcctatgaggccaccatcaaagacatcgacaagaagtcggacattgccaccatcaagatccatcccaagaaaaagctccctgtgttgttgctgggtcactcggccgacctgcggcctggggagtttgtggtggccatcggcagtcccttcgccctacagaacacagtgacaacgggcatcgtcagcactgcccagcgggagggcagggagctgggcctccgggactccgacatggactacatccagacggatgccatcatcaactacgggaactccgggggaccactggtgaacctggatggcgaggtcattggcatcaacacgctcaaggtcacggctggcatctcctttgccatcccctcagaccgcatcacacggttcctcacagagttccaagacaagcagatcaaagactggaagaagcgcttcatcggcatacggatgcggacgatcacaccaagcctggtggatgagctgaaggccagcaacccggacttcccagaggtcagcagtggaatttatgtgcaagaggttgcgccgaattcaccttctcagagaggcggcatccaagatggtgacatcatcgtcaaggtcaacgggcgtcctctagtggactcgagtgagctgcaggaggccgtgctgaccgagtctcctctcctactggaggtgcggcgggggaacgacgacctcctcttcagcatcgcacctgaggtggtcatg

SEQ ID NO: 8312 - DNA, 5325 bp, synthetic construct
  source 1..5325: mol_type = other DNA; note = Description of Artificial Sequence: Synthetic polynucleotide
atgagactcctcccccgcttgctgctgcttctcttactcgtgttccctgccactgtcttgttccgaggcggccccagaggcttgttagcagtggcacaagatcttacagaggatgaagaaacagtagaagattccataattgaggatgaagatgatgaagccgaggtagaagaagatgaacccacagatttgcacactgtccgtgaagaaacgatgatggtgatgactgaagacatgcctttggaaatttcttatgtgccttctacttatttgactgaaatcactcatgtctcacaagccctattagaagtggaacaacttctcaatgctcctgacctctgtgctaaggactttgaagatctctttaagcaagaggagtctctgaagaatataaaagatagtctacaacaaagctcaggtcggattgacattattcatagcaagaagacagcagcattgcaaagtgcaacgcctgtggaaagggtgaagctacaggaagctctctcccagcttgatttccaatgggaaaaagttaacaaaatgtacaaggaccgacaagggcgatttgacagatctgttgagaaatggcggcgttttcattatgatataaagatatttaatcagtggctaacagaagctgaacagtttctcagaaagacacaaattcctgagaattgggaacatgctaaatacaaatggtatcttaaggaactccaggatggcattgggcagcggcaaactgttgtcagaacattgaatgcaactggggaagaaataattcagcaatcctcaaaaacagatgccagtattctacaggaaaaattgggaagcctgaatctgcggtggcaggaggtctgcaaacagctgtcagacagaaaaaagaggctagaagaacaaaagaatatcttgtcagaatttcaaagagatttaaatgaatttgttttatggttggaggaagcagataacattgctagtatcccacttgaacctggaaaagagcagcaactaaaagaaaagcttgagcaagtcaagttactggtggaagagttgcccctgcgccagggaattctcaaacaattaaatgaaactggaggacccgtgcttgtaagtgctcccataagcccagaagagcaagataaacttgaaaataagctcaagcagacaaatctccagtggataaaggtttccagagctttacctgagaaacaaggagaaattgaagctcaaataaaagaccttgggcagcttgaaaaaaagcttgaagaccttgaagagcagttaaatcatctgctgctgtggttatctcctattaggaatcagttggaaatttataaccaaccaaaccaagaaggaccatttgacgttaaggaaactgaaatagcagttcaagctaaacaaccggatgtggaagagattttgtctaaagggcagcatttgtacaaggaaaaaccagccactcagccagtgaagaggaagttagaagatctgagctctgagtggaaggcggtaaaccgtttacttcaagagctgagggcaaagcagcctgacctagctcctggactgaccactattggagcctctcctactcagactgttactctggtgacacaacctgtggttactaaggaaactgccatctccaaactagaaatgccatcttccttgatgttggaggtacctgctctggcagatttcaaccgggcttggacagaacttaccgactggctttctctgcttgatcaagttataaaatcacagagggtgatggtgggtgaccttgaggatatcaacgagatgatcatcaagcagaaggcaacaatgcaggatttggaacagaggcgtccccagttggaagaactcattaccgctgcccaaaatttgaaaaacaagaccagcaatcaagaggctagaacaatcattacggatcgaattgaaagaattcagaatcagtgggatgaagtacaagaacaccttcagaaccggaggcaacagttgaatgaaatgttaaaggattcaacacaatggctggaagctaaggaagaagctgagcaggtcttaggacaggccagagccaagcttgagtcatggaaggagggtccctatacagtagatgcaatccaaaagaaaatcacagaaaccaagcagttggccaaagacctccgccagtggcagacaaatgtagatgtggcaaatgacttggccctgaaacttctccgggattattctgcagatgataccagaaaagtccacatgataacagagaatatcaatgcctcttggagaagcattcataaaagggtgagtgagcgagaggctgctttggaagaaactcatagattactgcaacagttccccctggacctggaaaagtttcttgcctggcttacagaagctgaaacaactgccaatgtcctacaggatgctacccgtaaggaaaggctcctagaagactccaagggagtaaaagagctgatgaaacaatggcaagacctccaaggtgaaattgaagctcacacagatgtttatcacaacctggatgaaaacagccaaaaaatcctgagatccctggaaggttccgatgatgcagtcctgttacaaagacgtttggataacatgaacttcaagtggagtgaacttcggaaaaagtctctcaacattaggtcccatttggaagccagttctgaccagtggaagcgtctgcacctttctctgcaggaacttctggtgtggctacagctgaaagatgatgaattaagccggcaggcacctattggaggcgactttccagcagttcagaagcagaacgatgtacatagggccttcaagagggaattgaaaactaaagaacctgtaatcatgagtactcttgagactgtacgaatatttctgacagagcagcctttggaaggactagagaaactctaccaggagcccagagagctgcctcctgaggagagagcccagaatgtcactcggcttctacgaaagcaggctgaggaggtcaatactgagtgggaaaaattgaacctgcactccgctgactggcagagaaaaatagatgagacccttgaaagactccgggaacttcaagaggccacggatgagctggacctcaagctgcgccaagctgaggtgatcaagggatcctggcagcccgtgggcgatctcctcattgactctctccaagatcacctcgagaaagtcaaggcacttcgaggagaaattgcgcctctgaaagagaacgtgagccacgtcaatgaccttgctcgccagcttaccactttgggcattcagctctcaccgtataacctcagcactctggaagacctgaacaccagatggaagcttctgcaggtggccgtcgaggaccgagtcaggcagctgcatgaagcccacagggactttggtccagcatctcagcactttctttccacgtctgtccagggtccctgggagagagccatctcgccaaacaaagtgccctactatatcaaccacgagactcaaacaacttgctgggaccatcccaaaatgacagagctctaccagtctttagctgacctgaataatgtcagattctcagcttataggactgccatgaaactccgaagactgcagaaggccctttgcttggatctcttgagcctgtcagctgcatgtgatgccttggaccagcacaacctcaagcaaaatgaccagcccatggatatcctgcagattattaattgtttgaccactatttatgaccgcctggagcaagagcacaacaatttggtcaacgtccctctctgcgtggatatgtgtctgaactggctgctgaatgtttatgatacgggacgaacagggaggatccgtgtcctgtcttttaaaactggcatcatttccctgtgtaaagcacatttggaagacaagtacagataccttttcaagcaagtggcaagttcaacaggattttgtgaccagcgcaggctgggcctccttctgcatgattctatccaaattccaagacagttgggtgaagttgcatcctttgggggcagtaacattgagccaagtgtccggagctgcttccaatttgctaataataagccagagatcgaagcggccctcttcctagactggatgagactggaaccccagtccatggtgtggctgcccgtcctgcacagagtggctgctgcagaaactgccaagcatcaggccaaatgtaacatctgcaaagagtgtccaatcattggattcaggtacaggagtctaaagcactttaattatgacatctgccaaagctgctttttttctggtcgagttgcaaaaggccataaaatgcactatcccatggtggaatattgcactccgactacatcaggagaagatgttcgagactttgccaaggtactaaaaaacaaatttcgaaccaaaaggtattttgcgaagcatccccgaatgggctacctgccagtgcagactgtcttagagggggacaacatggaaactcccgttactctgatcaacttctggccagtagattctgcgcctgcctcgtcccctcagctttcacacgatgatactcattcacgcattgaacattatgctagcaggctagcagaaatggaaaacagcaatggatcttatctaaatgatagcatctctcctaatgagagcatagatgatgaacatttgttaatccagcattactgccaaagtttgaaccaggactcccccctgagccagcctcgtagtcctgcccagatcttgatttccttagagagtgaggaaagaggggagctagagagaatcctagcagatcttgaggaagaaaacaggaatctgcaagcagaatatgaccgtctaaagcagcagcacgaacataaaggcctgtccccactgccgtcccctcctgaaatgatgcccacctctccccagagtccccgggatgctgagctcattgctgaggccaagctactgcgtcaacacaaaggccgcctggaagccaggatgcaaatcctggaagaccacaataaacagctggagtcacagttacacaggctaaggcagctgctggagcaaccccaggcagaggccaaagtgaatggcacaacggtgtcctctccttctacctctctacagaggtccgacagcagtcagcctatgctgctccgagtggttggcagtcaaacttcggactccatgggtgaggaagatcttctcagtcctccccaggacacaagcacagggttagaggaggtgatggagcaactcaacaactccttccctagttcaagaggaagaaatacccctggaaagccaatgagagaggacacaatg

SEQ ID NO: 8313 - DNA, 2205 bp, synthetic construct
  source 1..2205: mol_type = other DNA; note = Description of Artificial Sequence: Synthetic polynucleotide
atgccactcctgggtcagacggtgaggtcggcgtctgcgaggacgcggcggtggagtagaagggcagccggagacaggcccggcgccccttccgaggctagacggccccagcttcgcggggatcatggcattgtggaccgagtgcggggccactggcgaatcgccggctcctgttcaacctgctggtgtccatctgcattgtgttcctcaacaaatggatttatgtgtaccttccccaacatgagcctgaccctggtgcacttcgtggtcacctggctgggcttgtatatctgccagaagctggacatctttgcccccaaaagtctgccgccctccaggctcctcctcctggccctcagcttctgtggctttgtggtcttcactaacctttctctgcagaacaacaccataggcacctatcagctggccaaggccatgaccacgccggtgatcatagccatccagaccttctgctaccagaaaaccttctccaccagaatccagctcacgctgattcctataactttaggtgtaatcctaaattcttattacgatgtgaagtttaatttccttggaatggtgtttgctgctcttggtgttttagttacatccctttatcaagtgtgggtaggagccaaacagcatgaattacaagtgaactcaatgcagctgctgtactaccaggctccgatgtcatctgccatgttgctggttgctgtgcccttctttgagccagtgtttggagaaggaggaatatttggtccctggtcagtttctgctttgttcctctgtgacgagggtgcaggtatctctggggactacatcgatcgcgtggacgagcccttgtcctgctcttatgtgctgaccattcgcactcctcggctctgcccccaccctctcctccggcccccacccagtgctgcaccgcaggccatcctctgtcacccttccctacagcctgaggagtacatggcctacgttcagaggcaagccgactcaaagcagtatggagataaaatcatagaggagctgcaagatctaggcccccaagtgtggagtgagaccaagtctggggtggcaccccaaaagatggcaggtgcgagcccgaccaaggatgacagtaaggactcagatttctggaagatgcttaatgagccagaggaccaggccccaggaggggaggaggtgccggctgaggagcaggacccaagccctgaggcagcagattcagcttctggtgctcccaatgattttcagaacaacgtgcaggtcaaagtcattcgaagccctgcggatttgattcgattcatagaggagctgaaaggtggaacaaaaaaggggaagccaaatataggccaagagcagcctgtggatgatgctgcagaagtccctcagagggaaccagagaaggaaaggggtgatccagaacggcagagagagatggaagaagaggaggatgaggatgaggatgaggatgaagatgaggatgaacggcagttactgggagaatttgagaaggaactggaagggatcctgcttccgtcagaccgagaccggctccgttcggaggtgaaggctggcatggagcgggaactggaaaacatcatccaggagacagagaaagagctggacccagatgggctgaagaaggagtcagagcgggatcgggcaatgctggctctcacatccactctcaacaaactcatcaaaagactggaggaaaaacagagtccagagctggtgaagaagcacaagaaaaagagggttgtccccaaaaagcctcccccatcaccccaacctacagaggaggatcctgagcacagagtccgggtccgggtcaccaagctccgtctcggaggccctaatcaggatctgactgtcctcgagatgaaacgggaaaacccacagctgaaacaaatcgaggggctggtgaaggagctgctggagagggagggactcacagctgcagggaaaattgagatcaaaattgtccgcccatgggctgaagggactgaagagggtgcacgttggctgactgatgaggacacgagaaacctcaaggagatcttcttcaatatcttggtgccgggagctgaagaggcccagaaggaacgccagcggcagaaagagctggagagcaattaccgccgggtgtggggctctccaggtggggagggcacaggggacctggacgaatttgacttc

SEQ ID NO: 8314 - DNA, 3051 bp, synthetic construct
  source 1..3051: mol_type = other DNA; note = Description of Artificial Sequence: Synthetic polynucleotide
atggtcccagaggcctggaggagcggactggtaagcaccgggagggtagtgggagttttgcttctgcttggtgccttgaacaaggcttccacggtcattcactatgagatcccggaggaaagagagaagggtttcgctgtgggcaacgtggtcgcgaaccttggtttggatctcggtagcctctcagcccgcaggttccgggtggtgtctggagctagccgaagattctttgaggtgaaccgggagaccggagagatgtttgtgaacgaccgtctggatcgagaggagctgtgtgggacactgccctcttgcactgtaactctggagttggtagtggagaacccgctggagctgttcagcgtggaagtggtgatccaggacatcaacgacaacaatcctgctttccctacccaggaaatgaaattggagattagcgaggccgtggctccggggacgcgctttccgctcgagagcgcgcacgatcccgatgtgggaagcaactctttacaaacctatgagctgagccgaaatgaatactttgcgcttcgcgtgcagacgcgggaggacagcaccaagtacgcggagctggtgttggagcgcgccctggaccgagaacgggagcctagtctccagttagtgctgacggcgttggacggagggaccccagctctctccgccagcctgcctattcacatcaaggtgctggacgcgaatgacaatgcgcctgtcttcaaccagtccttgtaccgggcgcgcgtcctggaggatgcaccctccggcacgcgcgtggtacaagtccttgcaacggatctggatgaaggccccaacggtgaaattatttactccttcggcagccacaaccgcgccggcgtgcggcaactattcgccttagaccttgtaaccgggatgctgacaatcaagggtcggctggacttcgaggacaccaaactccatgagatttacatccaggccaaagacaagggcgccaatcccgaaggagcacattgcaaagtgttggtggaggttgtggatgtgaatgacaacgccccggagatcacagtcacctccgtgtacagcccagtacccgaggatgcccctctggggactgtcatcgctttgctcagtgtgactgacctggatgctggcgagaacgggctggtgacctgcgaagttccaccgggtctccctttcagccttacttcttccctcaagaattacttcactttgaaaaccagtgcagacctggatcgggagactgtgccagaatacaacctcagcatcaccgcccgagacgccggaaccccttccctctcagcccttacaatagtgcgtgttcaagtgtccgacatcaatgacaaccctccacaatcttctcaatcttcctacgacgtttacattgaagaaaacaacctccccggggctccaatactaaacctaagtgtctgggaccccgacgccccgcagaatgctcggctttctttctttctcttggagcaaggagctgaaaccgggctagtgggtcgctatttcacaataaatcgtgacaatggcatagtgtcatccttagtgcccctagactatgaggatcggcgggaatttgaattaacagctcatatcagcgatgggggcaccccggtcctagccaccaacatcagcgtgaacatatttgtcactgatcgcaatgacaatgccccccaggtcctatatcctcggccaggtgggagctcggtggagatgctgcctcgaggtacctcagctggccacctagtgtcacgggtggtaggctgggacgcggatgcagggcacaatgcctggctctcctacagtctcttgggatcccctaaccagagcctttttgccatagggctgcacactggtcaaatcagtactgcccgtccagtccaagacacagattcacccaggcagactctcacggtcttgatcaaagacaatggggagccttcgctctccaccactgctaccctcactgtgtcagtaaccgaggactctcctgaagcccgagccgagttcccctctggctctgccccccgggagcagaaaaaaaatctcaccttttatctacttctttctctaatcctggtttctgtggggtttgtggtcacagtgttcggagtaatcatattcaaagtttacaagtggaagcagtctagagacctataccgagccccggtgagctcactgtaccgaacaccagggccctccttgcacgcggacgccgtgcggggaggcctgatgtcgccgcacctttaccatcaggtgtatctcaccacggactcccgccgcagcgacccgctgctgaagaaacctggtgcagccagtccactggccagccgccagaacacgctgcggagctgtgatccggtgttctataggcaggtgttgggtgcagagagcgcccctcccggacaggaggagcaaaatagaggcaagcccaattgggagcatctaaatgaagatttacatgtactaatcactgtggaagatgctcagaacagagcagaaatcaaattgaagagagcagttgaagaagtgaagaaattattggtacctgcagcagaaggagaagacagcctgaagaagatgcagctgatggagcttgcgattctgaatggcacctacagagatgccaacattaaatcaccagcccttgccttttctcttgcagcaacagcccaggctgctccaaggatcattactgggcctgcgccggttctcccaccagctgccctgcgtactcctacgccagctggccctaccataatgcctttgatcagacaaatacagaccgctgtcatgccaaacggaactcctcacccaactgctgcaatagttcctccagggcccgaagctggtttaatctatacaccctatgagtacccctacacattggcaccagctacatcaatccttgagtatcctattgaacctagtggtgtattaggtgcggtggctactaaagttcgaaggcacgatatgcgtgtccatccttaccaaaggattgtgaccgcagaccgagccgccaccggcaac

SEQ ID NO: 8315 - DNA, 480 bp, synthetic construct
  source 1..480: mol_type = other DNA; note = Description of Artificial Sequence: Synthetic polynucleotide
atggcggacatcgagcagtactacatgaagccgcccgagatcgttaaggaggctgaggtgccgcaggctgcgctgggcgtcccagcccaggggacaggggacaatggccacacgcctgtggaggaggaggtcgggggcatcccagtaccagcaccggggctcctgcaggtcacggagaggaggcagcctctgagcagcgtctcctctctggaggtccacttcgacctcctggacctcactgagctcaccgacatgtcggaccaggagctggccgaggtctttgctgactcggacgacgagaacctcaacaccgagtccccagcaggtctgcacccgctgccccgggccggctacctgcgctccccttcctggacgaggacaagggctgagcagagccacgagaagcagcccctaggcgaccccgagcggcaggccacagtcctggacacgtttctcactgtggagaggccccaggaggac

SEQ ID NO: 8316 - DNA, 4284 bp, synthetic construct
  source 1..4284: mol_type = other DNA; note = Description of Artificial Sequence: Synthetic polynucleotide
atggccgcgcaggtcgcccccgccgccgccagcagcctgggcaacccgccgccgccgccgccctcggagctgaagaaagccgagcagcagcagcgggaggaggcggggggcgaggcggcggcggcggcagcggccgagcgcggggaaatgaaggcagccgccgggcaggaaagcgagggccccgccgtggggccgccgcagccgctgggaaaggagctgcaggacggggccgagagcaatgggggtggcggcggcggcggagccggcagcggcggcgggcccggcgcggagccggacctgaagaactcgaacgggaacgcgggccctaggcccgccctgaacaataacctcacggagccgcccggcggcggcggtggcggcagcagcgatggggtgggggcgcctcctcactcagccgcggccgccttgccgcccccagcctacggcttcgggcaaccctacggccggagcccgtctgccgtcgccgccgccgcggccgccgtcttccaccaacaacatggcggacaacaaagccctggcctggcagcgctgcagagcggcggcggcgggggcctggagccctacgcggggccccagcagaactctcacgaccacggcttccccaaccaccagtacaactcctactaccccaaccgcagcgcctaccccccgcccgccccggcctacgcgctgagctccccgagaggtggcactccgggctccggcgcggcggcggctgccggctccaagccgcctccctcctccagcgcctccgcctcctcgtcgtcttcgtccttcgctcagcagcgcttcggggccatggggggaggcggcccctccgcggccggcgggggaactccccagcccaccgccacccccaccctcaaccaactgctcacgtcgcccagctcggcccggggctaccagggctaccccgggggcgactacagtggcgggccccaggacgggggcgccggcaagggcccggcggacatggcctcgcagtgttggggggctgcggcggcggcagctgcggcggcggccgcctcgggaggggcccaacaaaggagccaccacgcgcccatgagccccgggagcagcggcggcggggggcagccgctcgcccggacccctcagccatccagtccaatggatcagatgggcaagatgagacctcagccatatggcgggactaacccatactcgcagcaacagggacctccgtcaggaccgcagcaaggacatgggtacccagggcagccatacgggtcccagaccccgcagcggtacccgatgaccatgcagggccgggcgcagagtgccatgggcggcctctcttatacacagcagattcctccttatggacaacaaggccccagcgggtatggtcaacagggccagactccatattacaaccagcaaagtcctcaccctcagcagcagcagccaccctactcccagcaaccaccgtcccagacccctcatgcccaaccttcgtatcagcagcagccacagtctcaaccaccacagctccagtcctctcagcctccatactcccagcagccatcccagcctccacatcagcagtccccggctccatacccctcccagcagtcgacgacacagcagcacccccagagccagcccccctactcacagccacaggctcagtctccttaccagcagcagcaacctcagcagccagcaccctcgacgctctcccagcaggctgcgtatcctcagccccagtctcagcagtcccagcaaactgcctattcccagcagcgcttccctccaccgcaggagctatctcaagattcatttgggtctcaggcatcctcagccccctcaatgacctccagtaagggagggcaagaagatatgaacctgagccttcagtcaagaccctccagcttgcctgatctatctggttcaatagatgacctccccatggggacagaaggagctctgagtcctggagtgagcacatcagggatttccagcagccaaggagagcagagtaatccagctcagtctcctttctctcctcatacctcccctcacctgcctggcatccgaggcccttccccgtcccctgttggctctcccgccagtgttgctcagtctcgctcaggaccactctcgcctgctgcagtgccaggcaaccagatgccacctcggccacccagtggccagtcggacagcatcatgcatccttccatgaaccaatcaagcattgcccaagatcgaggttatatgcagaggaacccccagatgccccagtacagttccccccagcccggctcagccttatctccgcgtcagccttccggaggacagatacacacaggcatgggctcctaccagcagaactccatggggagctatggtccccaggggggtcagtatggcccacaaggtggctaccccaggcagccaaactataatgccttgcccaatgccaactaccccagtgcaggcatggctggaggcataaaccccatgggtgccggaggtcaaatgcatggacagcctggcatcccaccttatggcacactccctccagggaggatgagtcacgcctccatgggcaaccggccttatggccctaacatggccaatatgccacctcaggttgggtcagggatgtgtcccccaccagggggcatgaaccggaaaacccaagaaactgctgtcgccatgcatgttgctgccaactctatccaaaacaggccgccaggctaccccaatatgaatcaagggggcatgatgggaactggacctccttatggacaagggattaatagtatggctggcatgatcaaccctcagggacccccatattccatgggtggaaccatggccaacaattctgcagggatggcagccagcccagagatgatgggccttggggatgtaaagttaactccagccaccaaaatgaacaacaaggcagatgggacacccaagacagaatccaaatccaagaaatccagttcttctactacaaccaatgagaagatcaccaagttgtatgagctgggtggtgagcctgagaggaagatgtgggtggaccgttatctggccttcactgaggagaaggccatgggcatgacaaatctgcctgctgtgggtaggaaacctctggacctctatcgcctctatgtgtctgtgaaggagattggtggattgactcagatgcaggccctgacttcctgtgagtgcaccatctgtcctgactgcttccgccagcacttcaccatcgccttgaaggagaagcacatcacagacatggtgtgccctgcctgtggccgccccgacctcaccgatgacacacagttgctcagctacttctctacccttgacatccagcttcgcgagagcctagagccagatgcctatgcgttgttccataagaagctgaccgagggtgtgctgatgcgggaccccaagttcttgtggtgtgcccagtgctcctttggcttcatatatgagcgtgagcagctggaggcaacttgtccccagtgtcaccagaccttctgtgtgcgctgcaagcgccagtgggaggagcagcaccgaggtcggagctgtgaggacttccagaactggaaacgcatgaacgacccagaataccaggcccagggcctagcaatgtatcttcaggaaaacggcattgactgccccaaatgcaagttctcgtacgccctggcccgaggaggctgcatgcactttcactgtacccagtgccgccaccagttctgcagcggctgctacaatgccttttacgccaagaataaatgtccagagcctaactgcagggtgaaaaagtccctgcacggccaccaccctcgagactgcctcttctacctgcgggactggactgctctccggcttcagaagctgctacaggacaataacgtcatgtttaatacagagcctccagctggggcccgggcagtccctggaggcggctgccgagtgatagagcagaaggaggttcccaatgggctcagggacgaagcttgtggcaaggaaactccagctggctatgccggcctgtgccaggcacactacaaagagtatcttgtgagcctcatcaatgcccactcgctggacccagccaccttgtatgaggtggaagagctggagacggccactgagcgctacctgcacgtacgcccccagcctttggctggagaggatccccctgcttaccaggcccgcttgttacagaagctgacagaagaggtacccttgggacagagtatcccccgcaggcggaag

SEQ ID NO: 8317 - DNA, 3051 bp, synthetic construct; identical to SEQ ID NO: 8276
  source 1..3051: mol_type = other DNA; note = Description of Artificial Sequence: Synthetic polynucleotide

SEQ ID NO: 8318 - DNA, 1506 bp, synthetic construct
  source 1..1506: mol_type = other DNA; note = Description of Artificial Sequence: Synthetic polynucleotide
atggccgcgcaggtcgcccccgccgccgccagcagcctgggcaacccgccgccgccgccgccctcggagctgaagaaagccgagcagcagcagcgggaggaggcggggggcgaggcggcggcggcggcagcggccgagcgcggggaaatgaaggcagccgccgggcaggaaagcgagggccccgccgtggggccgccgcagccgctgggaaaggagctgcaggacggggccgagagcaatgggggtggcggcggcggcggagccggcagcggcggcgggcccggcgcggagccggacctgaagaactcgaacgggaacgcgggccctaggcccgccctgaacaataacctcacggagccgcccggcggcggcggtggcggcagcagcgatggggtgggggcgcctcctcactcagccgcggccgccttgccgcccccagcctacggcttcgggcaaccctacggccggagcccgtctgccgtcgccgccgccgcggccgccgtcttccaccaacaacatggcggacaacaaagccctggcctggcagcgctgcagagcggcggcggcgggggcctggagccctacgcggggccccagcagaactctcacgaccacggcttccccaaccaccagtacaactcctactaccccaaccgcagcgcctaccccccgcccgccccggcctacgcgctgagctccccgagaggtggcactccgggctccggcgcggcggcggctgccggctccaagccgcctccctcctccagcgcctccgcctcctcgtcgtcttcgtccttcgctcagcagcgcttcggggccatggggggaggcggcccctccgcggccggcgggggaactccccagcccaccgccacccccaccctcaaccaactgctcacgtcgcccagctcggcccggggctaccagggctaccccgggggcgactacagtggcgggccccaggacgggggcgccggcaagggcccggcggacatggcctcgcagtgttggggggctgcggcggcggcagctgcggcggcggccgcctcgggaggggcccaacaaaggagccaccacgcgcccatgagccccgggagcagcggcggcggggggcagccgctcgcccggacccctcaggtccatctgggaagcgggatttgggttgatgaggagaaatggcaccagctacaagtaacccaaggagattccaagtacacgaagaacttggcagttatgatttggggaacagatgttctgaaaaacagaagcgtcacaggcgtcgccacaaaaaaaaagaaagatgcagtccctaaaccacccctctcgcctcacaaactaagcatcgtcagagagtgtttgtatgacagaatagcacaagaaactgtggatgaaactgaaattgcacagagactctccaaagtcaacaagtacatctgtgaaaaaatcatggatatcaataaatcctgtaaaaatgaagaacgaagggaagcaaaatacaatttgcaa

SEQ ID NO: 8319 - DNA, 2319 bp, synthetic construct
  source 1..2319: mol_type = other DNA; note = Description of Artificial Sequence: Synthetic polynucleotide
atgcttctctcgttacctgccttacatcttcagacctccgaacaccatcctttcttccagctgccacacagaaggctcggaccatggtgcagtcccactggctcccctgcccccctctcctgtgagactggctgcggggagggatcatggatacttgtctgccggcttctggttcccacgcaagtaagcctgctgtcaatggaggaggacattgatacccgcaaaatcaacaacagtttcctgcgcgaccacagctatgcgaccgaagctgacattatctctacggtagaattcaaccacacgggagaattactagcgacaggggacaaggggggtcgggttgtaatatttcaacgagagcaggagagtaaaaatcaggttcatcgtaggggtgaatacaatgtttacagcacattccagagccatgaacccgagttcgattacctgaagagtttagaaatagaagaaaaaatcaataaaataagatggctcccccagcagaatgcagcttactttcttctgtctactaatgataaaactgtgaagctgtggaaagtcagcgagcgtgataagaggccagaaggctacaatctgaaagatgaggagggccggctccgggatcctgccaccatcacaaccctgcgggtgcctgtcctgagacccatggacctgatggtggaggccaccccacgaagagtatttgccaacgcacacacatatcacatcaactccatatctgtcaacagcgactatgaaacctacatgtccgctgatgacctgaggattaacctatggaactttgaaataaccaatcaaagttttaatattgtggacattaagccagccaacatggaggagctcacggaggtgatcacagcagccgagttccacccccatcattgcaacaccttcgtgtacagcagcagcaaagggacaatccggctgtgtgacatgcgggcatctgccctgtgtgacaggcacaccaaatcaggggaaatgctgtctgtagctgagcacttcctggagcagcagatgcacccaacagtggtgatcagtgcttaccgcaaggcattggatgatatgatcagcaccctaaagaaaataagtatcccagtcgacatcagtgacagtgatatgatgctgaacatcatcaacagctctattactaccaaagccatcagtcggtggtcatctttggcttgcaacattgccctggatgctgtcaagatggtacagtttgaggagaatggtcggaaagagattgacataaaaaaatatgcaagagtggaaaagatacctggaggcatcattgaagactcctgtgtcttgcgtggagtcatgattaacaaggatgtgacccatccacgtatgcggcgctatatcaagaaccctcgcattgtgctgctggattcttctctggaatacaagaaaggagaaagccagactgacattgagattacacgagaggaggacttcacccgaattctccagatggaggaagagtacatccagcagctctgtgaggacattatccaactgaagcccgatgtggtcatcactgaaaagggcatctcagatttagctcagcactaccttatgcgggccaatatcacagccatccgcagagtccggaagacagacaataatcgcattgctagagcctgtggggcccggatagtcagccgaccagaggaactgagagaagatgatgttggaacaggagcaggcctgttggaaatcaagaaaattggagatgaatactttactttcatcactgactgcaaagaccccaaggcctgcaccattctcctccggggggctagcaaagagattctctcggaagtagaacgcaacctccaggatgccatgcaagtgtgtcgcaatgttctcctggaccctcagctggtgccagggggtggggcctccgagatggctgtggcccatgccttgacagaaaaatccaaggccatgactggtgtggaacaatggccatacagggctgttgcccaggccctagaggtcattcctcgtaccctgatccagaactgtggggccagcaccatccgtctacttacctcccttcgggccaagcacacccaggagaactgtgagacctggggtgtaaatggtgagacgggtactttggtggacatgaaggaactgggcatatgggagccattggctgtgaagctgcagacttataagacagcagtggagacggcagttctgctactgcgaattgatgacatcgtttcaggccacaaaaagaaaggcgatgaccagagccggcaaggcggggctcctgatgctggccaggag

SEQ ID NO: 8320 - DNA, 4284 bp, synthetic construct; identical to SEQ ID NO: 8316
  source 1..4284: mol_type = other DNA; note = Description of Artificial Sequence: Synthetic polynucleotide

SEQ ID NO: 8321 - DNA, 837 bp, synthetic construct
  source 1..837: mol_type = other DNA; note = Description of Artificial Sequence: Synthetic polynucleotide
atggctgagctggatccgttcggcgcccctgccggcgcccctggcggtcccgcgctggggaacggagtggccggcgccggcgaagaagacccggctgcggccttcttggcgcagcaagagagcgagattgcgggcatcgagaacgacgaggccttcgccatcctggacggcggcgcccccgggccccagccgcacggcgagccgccggggggtccggatgctgttgatggagtaatgaatggtgaatactaccaggaaagtaatggtccaacagacagttatgcagctatttcacaagtggatcgattgcagtcagagcctgaaagtatccgtaaatggagagaagaacaaatggaacgcttggaagcccttgatgccaattctcggaagcaagaagcagagtggaaagaaaaggcaataaaggagctagaagaatggtatgcaagacaggacgagcagctacagaaaacaaaagcaaacaacaggactatcctattaagtgtaatctcactgcttaatgagcccaacaccttctccccagccaatgtcgatgcttcagttatgttcaggaaatggagagacagtaaaggaaaagacaaagaatatgctgaaattattaggaaacaagtttcagccactaaggccgaagcagaaaaggatggagtgaaggtccccacaaccctggcggaatactgcatcaaaactaaagtgccttccaatgacaacagctcagatttgctttacgacgacttgtatgatgacgacattgatgatgaagatgaggaggaggaagatgccgactgttatgatgatgatgattctgggaatgaggagtcg

SEQ ID NO: 8322 - DNA, 558 bp, synthetic construct
  source 1..558: mol_type = other DNA; note = Description of Artificial Sequence: Synthetic polynucleotide
atgtcgcggcctgtcaggtttatggagagaaatcccttaaccaatgcaataatcaggaccaccacggcactcaccatattcaaagcaggggtcaagttcaatgtcatccccccagtggcccaggccacagtcaacttccggattcaccctggacagacagtccaagaggtcctagaactcacgaagaacattgtggctgataacagagtccagttccatgtgttgagtgcctttgaccccctccccgtcagcccttctgatgacaaggccttgggctaccagctgctccgccagaccgtacagtccgtcttcccggaagtcaatattactgccccagttacttctattggcaacacagacagccgattctttacaaacctcaccactggcatctacaggttctaccccatctacatacagcctgaagacttcaaacgcatccatggagtcaacgagaaaatctcagtccaagcctatgagacccaagtgaaattcatctttgagttgattcagaatgctgacacagaccaggagccagtttctcacctgcacaaactg

SEQ ID NO: 8323 - DNA, 2820 bp, synthetic construct
  source 1..2820: mol_type = other DNA; note = Description of Artificial Sequence: Synthetic polynucleotide
atgagggtagctgcggcgactgcggcggctggagcggggccggccatggcggtgtggacgcgggccaccaaagcggggctggtggagctgctcctgagggagcgctgggtccgagtggtggccgagctgagcggggagagcctgagcctgacgggcgacgccgccgcggccgagctggagcccgctctgggacccgcggccgccgccttcaacggcctcccaaacggcggcggcgcgggcgactcgctgcccgggagcccaagccgcggcctggggcccccgagcccgccggcgccgcctcggggccccgcgggtgaggcgggcgcgtcgccgcccgtgcgccgggtgcgggtggtgaagcaagaggcgggcggcctgggcatcagcatcaagggcggccgcgagaaccggatgccgatcctcatctccaagatcttccccgggctggctgccgaccagagccgggcgctgcggctgggcgacgccatcctgtcggtgaacggcaccgacctgcgccaggccacccacgaccaggccgtgcaggcgctgaagcgcgcgggcaaggaggtgctgctggaggtcaagttcatccgagaagtaacaccatatatcaagaagccatcattagtatcagatctgccgtgggaaggtgcagccccccagtcaccaagctttagtggcagtgaggactctggttcgccaaaacaccagaacagcaccaaggacaggaagatcatccctctcaaaatgtgctttgctgctagaaacctaagcatgccggatctggaaaacagattgatagagctacattctcctgatagcaggaacacgttgatcctacgctgcaaagatacagccacagcacactcctggttcgtagctatccacaccaacataatggctctcctcccacaggtgttggctgaactcaacgccatgcttggggcaaccagtacagcaggaggcagtaaagaggtgaagcatattgcctggctggcagaacaggcaaaactagatggtggaagacagcaatggagacctgtcctcatggctgtgactgagaaggatttgctgctctatgactgtatgccgtggacaagagatgcctgggcgtcaccatgccacagctacccacttgttgccaccaggttggttcattctggctccggatgtcgatccccctcccttggatctgaccttacatttgctaccaggacaggctctcgacagggcattgagatgcatctcttcagggtggagacacatcgggatctgtcatcctggaccaggatacttgttcagggttgccatgctgctgctgagctgatcaaggaagtctctctaggctgcatgttaaatggccaagaggtgaggcttactattcactatgaaaatgggttcaccatctcaagggaaaatggaggctccagcagcatattgtaccgctacccctttgaaaggctgaagatgtctgctgatgatggcatccgaaatctatacttggattttggtggtcccgagggagaactgaaagccattgatctggtgacgaaagccacagaggaggacaaagccaagaactacgaggaggcgctgcggctgtaccagcatgcggtggagtacttcctccacgctatcaagtatgaggcccacagcgacaaggccaaggagagcattcgagccaagtgcgtgcagtacctagaccgggccgagaagctgaaggattatttacgaagcaaagagaaacacggcaagaagccagtcaaagagaaccagagtgagggcaagggcagtgacagtgacagtgaaggggataatccggagaaaaagaaactgcaagaacagctgatgggtgccgtcgtgatggagaagcccaacatacggtggaacgacgtggccgggctggagggggccaaggaggccctcaaagaagctgtcattttgccaatcaaattcccacacttgttcacaggcaagcgcaccccctggcgggggattctgctgttcggaccccctggcacagggaaatcctacctggccaaagccgtggcaacagaggccaacaactccaccttcttctctgtgtcctcctcagatctgatgtccaagtggctgggggagagtgaaaagctggtcaagaacctgtttgagctggccaggcagcacaagccctccatcatcttcatcgatgaggtggattccctctgcgggtcccgaaatgaaaatgagagtgaggccgcccggaggatcaaaacggagttcttggtccagatgcagggggtggggaataacaatgatgggactctggttcttggagccacaaacatcccatgggtgttggattcggccatcaggaggaggtttgaaaaacgaatttatatccccttgccggaggaagctgcccgcgcccagatgttccggttgcatctcgggagcactccccacaacctcacggatgcaaacatccacgagctggcccggaagacggaaggctactcgggcgcggacatcagcatcatcgtgcgggactctctcatgcagcccgtgaggaaggtgcagtcggccacacacttcaaaaaggtctgtggcccctctcgcaccaaccccagcatgatgattgatgacctcctgactccatgctcaccaggggacccaggagccatggagatgacttggatggatgtccctggggacaaactcttagagcctgtggtttgcatgtcggacatgctgcggtctctggccaccacccggcccacggtgaatgcagacgacctcctgaaagtgaagaaattctcagaggactttgggcaagagagt

SEQ ID NO: 8324 - DNA, 1188 bp, synthetic construct
  source 1..1188: mol_type = other DNA; note = Description of Artificial Sequence: Synthetic polynucleotide
atgaagaccccggcggacacaggtgacagcgggaaggtgaccacagtcgtagccactctaggccaaggcccagagcgctcccaagaagtggcttacacggacatcaaagtgattggcaatggctcatttggggtcgtgtaccaggcacggctggcagagaccagggaactagtcgccatcaagaaggttctccaggacaagaggttcaagaaccgagagctgcagatcatgcgtaagctggaccactgcaatattgtgaggctgagatactttttctactccagtggcgagaagaaagacgagctttacctaaatctggtgctggaatatgtgcccgagacagtgtaccgggtggcccgccacttcaccaaggccaagttgaccatccctatcctctatgtcaaggtgtacatgtaccagctcttccgcagcttggcctacatccactcccagggcgtgtgtcaccgcgacatcaagccccagaacctgctggtggaccctgacactgctgtcctcaagctctgcgattttggcagtgcaaagcagttggtccgaggggagcccaatgtctcctacatctgttctcgctactaccgggccccagagctcatctttggagccactgattacacctcatccatcgatgtttggtcagctggctgtgtactggcagagctcctcttgggccagcccatcttccctggggacagtggggtggaccagctggtggagatcatcaaggtgctgggaacaccaacccgggaacaaatccgagagatgaaccccaactacacggagttcaagttccctcagattaaagctcacccctggacaaaggtgttcaaatctcgaacgccgccagaggccatcgcgctctgctctagcctgctggagtacaccccatcctcaaggctctccccactagaggcctgtgcgcacagcttctttgatgaactgcgatgtctgggaacccagctgcctaacaaccgcccacttccccctctcttcaacttcagtgctggtgaactctccatccaaccgtctctcaacgccattcttatccctcctcacttgaggtccccagcgggcactaccaccctcaccccgtcctcacaagctttaactgagactccgaccagctcagactggcagtcgaccgatgccacacctaccctcactaactcctcc

SEQ ID NO: 8325 - DNA, 3132 bp, synthetic construct
  source 1..3132: mol_type = other DNA; note = Description of Artificial Sequence: Synthetic polynucleotide
atgggcatggccaggggcagcctcactcgggttccaggggtgatgggagagggcactcagggcccagagctcagccttgaccctgacccttgctctccccaatccactccggggctcatgaaggggaacaagctggaggagcaggaccctagacctctgcagcccataccaggtctcatggaggggaacaagctggaggagcaggactctagccctccacagtccactccagggctcatgaaggggaacaagcgtgaggagcaggggctgggccccgaacctgcggcgccccagcagcccacggcggaggaggaggccctgatcgagttccaccgctcctaccgagagctcttcgagttcttctgcaacaacaccaccatccacggcgccatccgcctggtgtgctcccagcacaaccgcatgaagacggccttctgggcagtgctgtggctctgcacctttggcatgatgtactggcaattcggcctgcttttcggagagtacttcagctaccccgtcagcctcaacatcaacctcaactcggacaagctcgtcttccccgcagtgaccatctgcaccctcaatccctacaggtacccggaaattaaagaggagctggaggagctggaccgcatcacagagcagacgctctttgacctgtacaaatacagctccttcaccactctcgtggccggctcccgcagccgtcgcgacctgcgggggactctgccgcaccccttgcagcgcctgagggtcccgcccccgcctcacggggcccgtcgagcccgtagcgtggcctccagcttgcgggacaacaacccccaggtggactggaaggactggaagatcggcttccagctgtgcaaccagaacaaatcggactgcttctaccagacatactcatcaggggtggatgcggtgagggagtggtaccgcttccactacatcaacatcctgtcgaggctgccagagactctgccatccctggaggaggacacgctgggcaacttcatcttcgcctgccgcttcaaccaggtctcctgcaaccaggcgaattactctcacttccaccacccgatgtatggaaactgctatactttcaatgacaagaacaactccaacctctggatgtcttccatgcctggaatcaacaacggtctgtccctgatgctgcgcgcagagcagaatgacttcattcccctgctgtccacagtgactggggcccgggtaatggtgcacgggcaggatgaacctgcctttatggatgatggtggctttaacttgcggcctggcgtggagacctccatcagcatgaggaaggaaaccctggacagacttgggggcgattatggcgactgcaccaagaatggcagtgatgttcctgttgagaacctttacccttcaaagtacacacagcaggtgtgtattcactcctgcttccaggagagcatgatcaaggagtgtggctgtgcctacatcttctatccgcggccccagaacgtggagtactgtgactacagaaagcacagttcctgggggtactgctactataagctccaggttgacttctcctcagaccacctgggctgtttcaccaagtgccggaagccatgcagcgtgaccagctaccagctctctgctggttactcacgatggccctcggtgacatcccaggaatgggtcttccagatgctatcgcgacagaacaattacaccgtcaacaacaagagaaatggagtggccaaagtcaacatcttcttcaaggagctgaactacaaaaccaattctgagtctccctctgtcacggtgctcctggagctgttggtgggaatatacccctcaggggttattggactggtccctcacctaggggacagggagaagagagatagtgtgtgtccccaaggaaaatatatccaccctcaaaataattcgatttgctgtaccaagtgccacaaaggaacctacttgtacaatgactgtccaggcccggggcaggatacggactgcagggagtgtgagagcggctccttcaccgcttcagaaaaccacctcagacactgcctcagctgctccaaatgccgaaaggaaatgggtcaggtggagatctcttcttgcacagtggaccgggacaccgtgtgtggctgcaggaagaaccagtaccggcattattggagtgaaaaccttttccagtgcttcaattgcagcctctgcctcaatgggaccgtgcacctctcctgccaggagaaacagaacaccgtgtgcacctgccatgcaggtttctttctaagagaaaacgagtgtgtctcctgtagtaactgtaagaaaagcctggagtgcacgaagttgtgcctaccccagattgagaatgttaagggcactgaggactcaggcaccacagtgctgttgcccctggtcattttctttggtctttgccttttatccctcctcttcattggtttaatgtatcgctaccaacggtggaagtccaagctctactccattgtttgtgggaaatcgacacctgaaaaagagggggagcttgaaggaactactactaagcccctggccccaaacccaagcttcagtcccactccaggcttcacccccaccctgggcttcagtcccgtgcccagttccaccttcacctccagctccacctatacccccggtgactgtcccaactttgcggctccccgcagagaggtggcaccaccctatcagggggctgaccccatccttgcgacagccctcgcctccgaccccatccccaacccccttcagaagtgggaggacagcgcccacaagccacagagcctagacactgatgaccccgcgacgctgtacgccgtggtggagaacgtgcccccgttgcgctggaaggaattcgtgcggcgcctagggctgagcgaccacgagatcgatcggctggagctgcagaacgggcgctgcctgcgcgaggcgcaatacagcatgctggcgacctggaggcggcgcacgccgcggcgcgaggccacgctggagctgctgggacgcgtgctccgcgacatggacctgctgggctgcctggaggacatcgaggaggcgctttgcggccccgccgccctcccgcccgcgcccagtcttctcaga

SEQ ID NO: 8326 - DNA, 2049 bp, synthetic construct
  source 1..2049: mol_type = other DNA; note = Description of Artificial Sequence: Synthetic polynucleotide
atggtgaggagcaggcaaatgtgcaataccaacatgtctgtacctactgatggtgctgtaaccacctcacagattccagcttcggaacaagagaccctggttagaccaaagccattgcttttgaagttattaaagtctgttggtgcacaaaaagacacttatactatgaaagaggttcttttttatcttggccagtatattatgactaaacgattatatgatgagaagcaacaacatattgtatattgttcaaatgatcttctaggagatttgtttggcgtgccaagcttctctgtgaaagagcacaggaaaatatataccatgatctacaggaacttggtagtagtcaatcagcaggaatcatcggactcaggtacatctgtgagtgagaacaggtgtcaccttgaaggtgggagtgatcaaaaggaccttgtacaagagcttcaggaagagaaaccttcatcttcacatttggtttctagaccatctacctcatctagaaggagagcaattagtgagacagaagaaaattcagatgaattatctggtgaacgacaaagaaaacgccacaaatctgatagtatttccctttcctttgatgaaagcctggctctgtgtgtaataagggagatatgttgtgaaagaagcagtagcagtgaatctacagggacgccatcgaatccggatcttgatgctggtgtaagtgaacattcaggtgattggttggatcaggattcagtttcagatcagtttagtgtagaatttgaagttgaatctctcgactcagaagattatagccttagtgaagaaggacaagaactctcagatgaagatgatgaggtatatcaagttactgtgtatcaggcaggggagagtgatacagattcatttgaagaagatcctgaaatttccttagctgaatccgagggtgtttcctgccactattggtcgctgtttgacgggcacgcggggtccggggccgcggtggtggcgtcacgcctgctgcagcaccacatcacggagcagctgcaggacatcgtggacatcctgaagaactccgccgtcctgccccctacctgcctgggggaggagcctgagaacacgcccgccaacagccggactctgacccgggcagcctccctgcgcggaggggtgggggccccgggctcccccagcacgccccccacacgcttctttaccgagaagaagattccccatgagtgcctggtcatcggagcgcttgaaagtgcattcaaggaaatggacctacagatagaacgagagaggagttcatataatatatctggtggctgcacggccctcattgtgatttgccttttggggaagctgtatgttgcaaatgctggggatagcagggccataatcatcagaaatggagaaattatccccatgtcttcagaatttacccccgagacggagcgccagcgacttcagtacctggcattcatgcagcctcacttgctgggaaatgagttcacacatttggagtttccaaggagagtacagagaaaggagcttggaaagaagatgctctacagggactttaatatgacaggctgggcatacaaaaccattgaggatgaggacttgaagttcccccttatatatggagaaggcaagaaggcccgggtaatggcaactattggagtgaccaggggacttggggaccatgacctgaaggtgcatgactccaacatctacattaaaccattcctgtcttcagctccagaggtaagaatctacgatctttcaaaatatgatcatggatcagatgatgtgctgatcttggccactgatggactctgggacgttttatcaaatgaagaagtagcagaagcaatcactcagtttcttcctaactgtgatccagatgatcctcacaggtacacactggcagctcaggacctggtgatgcgtgcccggggtgtgctgaaggacagaggatggcggatatctaatgaccgactgggctcaggagacgacatttctgtatatgtcattcctttaatacatggaaacaagctgtca

SEQ ID NO: 8327 - DNA, 6405 bp, synthetic construct
  source 1..6405: mol_type = other DNA; note = Description of Artificial Sequence: Synthetic polynucleotide
atggaccctagaaatactgctatgttaggattgggttctgattccgaaggtttttcaagaaagagtccttctgccatcagtactggcacattggtcagtaagagagaagtagagctagaaaaaaacacaaaggaggaagaggaccttcgcaaacggaatcgagaaagaaacatcgaagctgggaaagatgatggtttgactgatgcacagcaacagttttcagtgaaagaaacaaacttttcagagggaaatttaaaattgaaaattggcctccaggctaagagaactaaaaaacctccaaagaacttggagaactatgtatgtcgacctgccataaaaacaactattaagcacccaaggaaagcacttaaaagtggaaagatgacggatgaaaagaatgaacactgtccttcaaaacgagacccttcaaagttgtacaagaaagcagatgatgttgcagccattgaatgccagtctgaagaagtcatccgtcttcattcacagggagaaaacaatcctttgtctaagaagctgtctccagtacactcagaaatggcagattatattaatgcaacgccatctactcttcttggtagccgggatcctgatttaaaggacagagcattacttaatggaggaactagtgtaacagaaaagttggcacagctgattgctacctgtcctccttccaagtcttccaagacaaaaccgaagaagttaggaactggcactacagcaggattggttagcaaggatttgatcaggaaagcaggtgttggctctgtagctggaataatacataaggacttaataaaaaagccaaccatcagcacagcagttggattggtaactaaagatcctgggaaaaagccagtgtttaatgcagcagtaggattggtcaataaggactctgtgaaaaaactgggaactggcactacagcggtattcattaataaaaacttaggcaaaaagccaggaactatcactacagtaggactgctaagcaaagattcaggaaagaagctaggaattggtattgttccaggtttagtgcataaagagtctggcaagaagttaggacttggcactgtggttggactggttaataaagatttgggaaagaaattgggttctactgttggcctagtggccaaggactgtgcaaagaagattgtagcaagttcagcaatgggattggttaataaggacattggaaagaaactaatgagttgtcctttggcaggtctgatcagtaaagatgccataaaccttaaagccgaagcactgctccccactcaggaaccgcttaaggcttcttgtagtacaaacatcaataatcaggaaagtcaggaactttctgaatccctgaaagatagtgccaccagcaaaacttttgaaaagaatgttgtacggcagaataaagaaagcatattggaaaagttctcagtacgaaaagaaatcattaatttggagaaagaaatgtttaatgaaggaacatgcattcagcaagacagtttctcatccagtgaaaagggatcttatgaaacctcaaagcatgaaaagcagcctcctgtatattgcacttctccggactttaaaatgggaggtgcttctgatgtatctaccgctaaatccccattcagtgcagtaggagaaagcaatctcccttccccatcacctactgtatctgttaatcctttaaccagaagtccccctgaaacttcttcacagttggctcctaatccattacttttaagttctactacagaactaatcgaagaaatttctgaatctgttggaaagaaccagtttacttctgaaagtacccacttgaacgttggtcataggtcagttggtcatagtataagtattgaatgtaaagggattgataaagaggtaaatgattcaaaaactacccatatagatattccaagaataagctcttcccttggaaaaaagccaagtttgacttctgaatccagcattcatactattactccttcagttgttaacttcactagtttatttagtaataagccttttttaaaactgggtgcagtatctgcatcagacaaacactgccaagttgctgaaagcctaagtactagtttgcagtccaaaccattaaaaaaaagaaaaggaagaaaacctcggtggactaaagtggtggcaagaagcacatgccggtctccaaaagggctagaattagaaagatcagagctttttaaaaacgtttcatgtagctcactatcaaatagtaattctgagccagccaagtttatgaaaaacattggacccccttcatttgtagatcatgacttccttaaacgccgattgccaaagttgagcaaatccacagctccatctcttgctctcttagctgatagtgaaaaaccatctcataagtcttttgctactcacaaactatcctccagtatgtgtgtctctagtgaccttttgtctgatatttataagcccaaaagaggaaggcctaaatctaaggagatgcctcaactggaagggccacctaaaaggactttaaaaatccctgcttctaaagtgttttctttacagtctaaggaagaacaagaacccccaattttacagccagaaattgaaatcccttccttcaaacaaggtctgtctgtgtctccttttccaaaaaagagaggcaggcctaagaggcaaatgaggtcaccagtcaagatgaagccacctgtactgtcagtggctccatttgttgccactgaaagtccaagcaagctagaatctgaaagtgacaaccatagaagtagcagtgatttctttgagagcgaggatcaacttcaggatccagatgacctagatgacagtcataggccaagtgtctgtagtatgagtgaccttgagatggaaccagataaaaaaattaccaagagaaacaatggacaattaatgaaaacaattatccgcaaaataaataaaatgaagactttaaagagaaagaaactgttgaatcagattctttcaagttctgtagaatcaagtaataaagggaaagtgcaatccaaactccataatacggtatcaagtcttgctgccacatttggctctaaattgggccaacagataaatgtcagcaagaaaggaaccatttatataggaaagagaagaggtcgcaaaccaaaaactgtcttaaatggtattctttctggtagtcctactagccttgctgttcttgagcaaacagctcaacaggcagctgggtcagcattaggacagattcttcccccattactgccttcatctgctagtagttctgagattcttccatcacctatttgctctcagtcttctgggactagtggaggtcagagccctgtaagtagtgatgcaggttttgttgaacccagttcagtgccatatttgcatttacactccagacagggcagtatgattcagactcttgcaatgaagaaggcctcaaaggggaggaggcggttatctcctcctactttgttgccaaattctccttcgcacttgagtgaactcacatctctaaaagaagctactccttccccaatcagtgagtctcatagtgatgagaccattcccagtgatagtggaattggaacagataataacagcacatcagacagggcagagaaattttgtgggcaaaaaaagaggaggcattcttttgagcatgtttctctgattccccctgaaacctctacagtgctaagcagtcttaaagaaaaacataaacacaaatgtaagcgcaggaatcatgattacctcagctatgacaagatgaaaaggcagaaacgaaaacggaaaaagaaatatccccagcttcgaaatagacaggatccagactttattgcagagctggaggaactaataagtcgcctaagtgaaattcggatcactcatcgaagtcatcattttatcccccgagatcttctgccaactatctttcgaatcaactttaatagtttctatacacatccttctttccccttagaccctttgcactacattcgaaaacctgacttaaaaaagaaaagagggagaccccctaagatgagggaggcaatggctgaaatgccttttatgcacagccttagttttcctctttctagtactggattctatccatcttatggtatgccttactctccttcaccccttacagctgctcccataggattaggttactatggaaggtatcctcccactctttatccacctcctccatctccttctttcaccacgccacttccacctccttcctatatgcatgctggtcatttacttctcaatcctgccaaataccataagaaaaagcataagctacttcgacaggaggcctttcttacaaccagcaggactcccctcctttccatgagtacctaccccagtgttcctcctgagatggcctatggttggatggttgagcacaaacacaggcaccgtcacaaacacagagaacaccgttcttctgaacaaccccaggtttctatggacactggctcttcccgatctgtcctggaatctttgaagcgctatagatttggaaaggatgctgttggagagcgatataagcataaggaaaagcaccgttgtcacatgtcctgccctcatctctctccttcaaaaagcttaataaacagagaggaacagtgggtccaccgagagccttcagaatctagtccattggccttgggattgcagacacctttacagattgactgttcagaaagttctccaagcttatcccttggaggattcactcccaactctgagccagccagcagtgatgaacatacaaaccttttcacaagtgcaataggcagctgcagagtttcaaaccctaactccagtggccggaagaaattaactgacagccctggactcttttctgcacaggacacttcactaaatcggcttcacagaaaggagtcactgccttctaacgaaagggcagtacagactttggcaggctcccagccaacctctgataaaccctcccagcggccatcagagagcacaaattgtagccctacccggaaaaggtcttcatctgagagtacttcttcaacagtaaacggagttccctctcgaagtccaagattagttgcttctggggatgactctgtggatagtctgctgcagcggatggtacaaaatgaggaccaagagcccatggagaaaagtattgatgctgtgattgcaactgcctctgcaccaccttcttccagtccaggccgtagccacagcaaggaccgaaccctgggaaaaccagacagccttttagtgcctgcagtcacaagtgactcttgcaataatagcatctcactcctatctgaaaagttgacaagcagctgttccccccatcatatcaagagaagtgtagtggaagctatgcaacgccaagctcggaaaatgtgcaattacgacaaaatcttggccacaaagaaaaacctagaccatgtcaataaaatcttaaaagccaaaaaacttcaaaggcaggccaggacagggaataactttgtgaaacgtaggccaggtcgacctcggaaatgtccccttcaggctgtcgtatcaatgcaagcattccaggctgctcagtttgtcaacccagaattgaacagagacgaggaaggagcagcactgcacctcagtcctgacacagttacagatgtaattgaggctgttgttcagagtgtaaatctgaacccagaacataaaaaggggttgaagagaaaaggttggctattggaagaacagaccagaaaaaagcagaagccattaccagaggaagaagagcaagagaataataaaagctttaatgaagcaccagttgagattcccagtccttctgaaaccccagctaaaccttctgaacctgaaagtaccttgcagcctgtgctttctctcatcccaagggaaaagaagcccccacgtcccccaaagaagaagtatcagaaagcagggctgtattctgacgtttacaaaactacagacttctcacctggggcgggtgggttctgcaccaccctcccaccctccttcctccgtgtggacgatagagccacatccagcaccacggacagctcccgggcgccttcatctcctcgtcctccaggcagcacaagccattgtggaatctccaccaggtgtacagaacggtgcctctgcgtcctgccactcaggacctctcaagtccccgatgtgatggctcctcagcatgatcaggagaaattccatgatcttgcttattcctgtcttgggaagtccttctccatgtctaaccaagatctatatggctatagcaccagctctttggctcttggcttggcatggctaagttgggagaccaaaaagaagaatgtacttcatctggttgggctggattccctc

SEQ ID NO: 8328 - DNA, 1533 bp, synthetic construct
  source 1..1533: mol_type = other DNA; note = Description of Artificial Sequence: Synthetic polynucleotide
atgagcgggggcaagaagaagagtagtttccaaatcaccagcgtcaccacggactatgagggccctgggagcccaggggcttcggatccccctaccccacagcccccaaccgggcccccgccccgcctgcccaatggggagcccagccccgatccggggggcaagggcaccccccggaatggctccccaccacctggggccccttcctcccgtttccgggtggtgaagctgccccacggcctgggagagccttatcgccgcggtcgctggacgtgtgtggatgtttatgagcgagacctggagccccacagcttcggcggactcctggagggaattcgaggggcctcagggggcgccgggggcagatctttggattccaggttggagctggccagcctcggcctgggcgcccccaccccaccgtcaggcctgtctcagggccccacctcctggctccgtccaccccccacctctcctggacctcaggcccgctccttcactgggggactgggccagctggtggtgcccagcaaagccaaggcagagaaacccccactgtcggcctcctcaccccagcagcgccccccagagcctgagaccggtgagagtgcgggcacatcccgggctgccacgcccctgccctctctgagggtggaagcggaggctgggggctcaggggccaggacccctccactgtcccggaggaaagctgtagacatgcggctgcggatggagttgggtgctccagaagagatggggcaggtgcccccacttgactctcgccccagctccccagccctctacttcacccacgatgccagcctggttcacaaatctccagaccccttcggagcagtagcagctcagaagttcagcctggcccactccatgttggccatcagtggtcacctagacagcgacgatgatagtggctccggaagcctggttggcattgacaacaaaatcgagcaagccatggttttcttctggaggcaaaaaattaaaccaaccatctcaggacaccctgactccaagaaacactcattgaagaagatggagaagactctccaggtggttgagactttgaggttggtcgagctcccaaaagaggctaagcccaagttgggtgagtcccccgagctggcagatccctgcgtgttggccaagactacagaggagaccgaggtggagctgggccaacagggccaatccctactgcagctgccgaggacggccgtcaagtctgtctccacgctcatggtctctgccctgcagagcggctggcagatgtgcagctggaagtcatcagtgagttctgcctcagtcagctcccaagtgaggacgcagtcacctttgaagactccggaggctgagttgctgtgggaggtgtacctggtgctgtgggccgttcggaaacacctgcgccggctgtaccgcaggcaggagaggcacagacggcaccacgtccgatgccatgctgccccccgacccaacccggctcagtccctgaaactggatgcccaaagtcccctc

SEQ ID NO: 8329 - DNA, 1833 bp, synthetic construct
  source 1..1833: mol_type = other DNA; note = Description of Artificial Sequence: Synthetic polynucleotide
atggctctgcggaggctgggggccgcgctgctgctgctgccgctgctcgccgccgtggaaggggccggccaggacgtgggccgaagctgcatcctggtctccattgcgggcaagaatgtcatgctggactgtggaatgcacatgggcttcaatgacgaccgacgcttccctgacttctcctacatcacccagaacggccgcctaacagacttcctggactgtgtgatcattagccacttccacctggaccactgcggggcactcccctacttcagcgagatggtgggctacgacgggcccatctacatgactcaccccacccaggccatctgccccatcttgctggaggactaccgcaagatcgccgtagacaagaagggcgaggccaacttcttcacctcccagatgatcaaagactgcatgaagaaggtggtggctgtccacctccaccagacggtccaggtagatgatgagctggagatcaaggcctactatgcaggccacgtgctgggggcagccatgttccagattaaagtgggctcagagtctgtggtctacacgggtgattataacatgaccccagaccgacacttaggagctgcctggattgacaagtgccgccccaacctgctcatcacagagtccacgtacgccacgaccatccgtgactccaagcgctgccgggagcgagacttcctgaagaaagtccacgagaccgtggagcgtggtgggaaggtgctgatacctgtgttcgcgctgggccgcgcccaggagctctgcatcctcctggagaccttctgggagcgcatgaacctgaaggtgcccatctacttctccacggggctgaccgagaaggccaaccactactacaagctgttcatcccctggaccaaccagaagatccgcaagactttcgtgcagaggaacatgtttgagttcaagcacatcaaggccttcgaccgggcttttgctgacaacccaggaccgatggttgtgtttgccacgccaggaatgctgcacgctgggcagtccctgcagatcttccggaaatgggccggaaacgaaaagaacatggtcatcatgcccggctactgcgtgcagggcaccgtcggccacaagatcctcagcgggcagcggaagctcgagatggaggggcggcaggtgctggaggtcaagatgcaggtggagtacatgtcattcagcgcacacgcggacgccaagggcatcatgcagctggtgggccaggcagagccggagagcgtgctgctggtgcatggcgaggccaagaagatggagttcctgaagcagaagatcgagcaggagctccgggtcaactgctacatgccggccaatggcgagacggtgacgctgcccacaagccccagcatccccgtaggcatctcgctggggctgctgaagcgggagatggcgcaggggctgctccctgaggccaagaagcctcggctcctgcacggcaccctgatcatgaaggacagcaacttccggctggtgtcctcagagcaagccctcaaagagctgggtctggctgagcaccagctgcgcttcacctgccgcgtgcacctgcatgacacacgcaaggagcaggagacggcattgcgcgtctacagccacctcaagagcgtcctgaaggaccactgtgtgcagcacctcccagacggctctgtgactgtggagtccgtcctcctccaggccgccgccccttctgaggacccaggcaccaaggtgctgctggtctcctggacctaccaggacgaggagctggggagcttcctcacatctctgctgaagaagggcctcccccaggcccccagc

SEQ ID NO: 8330 - DNA, 795 bp, synthetic construct
  source 1..795: mol_type = other DNA; note = Description of Artificial Sequence: Synthetic polynucleotide
atgaaccagccagagtctgccaacgatcctgaacccctgtgtgcagtgtgtggccaagcccactccttggaggaaaaccacttctacagctatccagaggaagtggatgatgacctcatctgccacatctgcctgcaggctttgctggaccccctggacactccgtgtggacacacctactgcaccctctgcctcaccaacttcctggtggagaaggacttctgtcccatggaccgcaagcctctggttctgcagcactgcaagaagtccagcatcctggtcaacaaactcctcaacaagctactggtgacctgcccattcagggagcactgcacccaggtgttgcagcgctgtgacctcgagcatcactttcaaaccagctgtaaaggtgcctcccactacggcctgaccaaagataggaagaggcgctcacaagatggctgtccagacggctgtgcgagcctcacagccacggctccctccccagaggtttctgcagctgccaccatctccttaatgacagacgagcctggcctagacaaccctgcctacgtgtcctcggcagaggacgggcagccagcaatcagcccagtggactctggccggagcaaccgaactagggcacggccctttgagagatccactattagaagcagatcatttaaaaaaataaatcgagctttgagtgttcttcgaaggacaaagagcgggagtgcagttgccaaccatgccgaccagggcagggaaaattctgaaaacaccactgcccctgaagtttggaaacacatgctactg

SEQ ID NO: 8331 - DNA, 3099 bp, synthetic construct
  source 1..3099: mol_type = other DNA; note = Description of Artificial Sequence: Synthetic polynucleotide
atgtggctgaaggtggggggcctacttcgggggaccggtggacagctgggccagactgttggttggccttgtggggccctggggcctgggccccaccgctggggaccatgtggaggttcttgggcccaaaagttttaccaggatgggcctgggagaggcctgggtgaggaggacattcgcagggcacgggaggcccgtcccaggaagacaccccggccccagctgagtgaccgctctcgagaacgcaaggtgcctgcctcccgcatcagccgcttggccaactttgggggactggctgtgggcttggggctaggagtactggccgagatggctaagaagtccatgccaggaggtcgtctgcagtcagagggtggttctgggctggactccagccccttcctgtcggaggccaatgccgagcggattgtgcagaccttatgtacagttcgaggggccgccctcaaggttggccagatgctcagcatccaggacaacagcttcatcagccctcagctgcagcacatctttgagcgggtccgccagagcgccgacttcatgccccgctggcagatgctgagagttcttgaagaggagctcggcagggactggcaggccaaggtggcctccttggaggaggtgccctttgccgctgcctcaattgggcaggtgcaccagggcctgctgagggacgggacggaggtggccgtgaagatccagtaccccggcatagcccagagcattcagagcgatgtccagaacctgctggcggtactcaagatgagcgcggccctgcccgcgggcctgtttgccgagcagagcctgcaggccttgcagcaggagctggcttgggagtgtgactaccgtcgtgaggcggcttgtgcccagaatttcaggcagctgctggcaaatgaccccttcttccgggtcccagccgtggttaaggagctgtgcacgacacgggtgctgggcatggagctggctggaggggtccccctggaccagtgccagggcctaagccaggacctgcggaaccagatttgcttccagctcctgacgctgtgtctgcgggagctgtttgagttccgattcatgcagactgaccccaactgggccaacttcctgtatgatgcctccagccaccaggtgaccctgctggactttggtgcaagccgggagtttgggacagagttcacagaccattacatcgaggtggtgaaggctgcagctgatggagacagagactgtgtcctgcagaagtccagggacctcaaattcctcacaggctttgaaaccaagggcggaccccggaggcctgagcggcacctgcccccagccccctgtggggccccggggcccccagaaacctgcaggacggagccagacggggcgggcaccatgaacaagttacggcagagcctgcggcggaggaagccagcctacgtgcccgaggcgtcgcgcccgcaccagtggcaggcagacgaggacgcggtgcggaagggcacgtgcagcttcccggtcaggtacctgggtcacgtggaggtagaggagtcccggggaatgcacgtgtgtgaagatgcggtgaagaagctgaaggcgatgggccgaaagtccgtgaagtctgtcctgtgggtgtcagccgatgggctccgagtggtggacgacaaaaccaaggatcttctggtcgaccagaccatcgaaaaggtctccttttgtgctcctgaccgcaacctggacaaggctttctcctatatctgtcgtgacgggactacccgccgctggatctgccactgttttctggcactgaaggactccggcgagaggctgagccacgctgtgggctgtgcttttgccgcctgcctggagcgaaaacagcgacgggagaaggaatgtggggtcacggccgccttcgatgccagccgcaccagcttcgcccgcgagggctccttccgcctgtctgggggtgggcggcctgctgagcgagaggccccggacaagaagaaagcagaggcagcagctgcccccactgtggctcctggccctgcccagcctgggcacgtgtccccgacaccagccaccacatcccctggtgagaagggtgaggcaggcacccctgtggctgcaggcaccactgcggccgccatcccccggcgccatgcacccctggagcagctggttcgccagggctccttccgtgggttcccagcactcagccagaagaactcgcctttcaaacggcagctgagcctacggctgaatgagctgccatccacgctgcagcgccgcactgacttccaggtgaagggcacagtgcctgagatggagcctcctggtgccggcgacagtgacagcatcaacgctctgtgcacacagatcagttcatcttttgccagtgctggagcgccagcaccagggccaccacctgccacaacagggacttctgcctggggtgagccctccgtgccccctgcagctgccttccagcctgggcacaagcggacaccttcagaggctgagcgatggctggaggaggtgtcacaggtggccaaggcccagcagcagcagcagcagcaacagcaacagcagcagcagcagcagcagcaacagcagcaagcagcctcagtggccccagtgcccaccatgcctcctgccctgcagcctttccccgcccccgtggggccctttgacgctgcacctgcccaagtggccgtgttcctgccacccccacacatgcagcccccttttgtgcccgcctacccgggcttgggctacccaccgatgccccgggtgcccgtggtgggcatcacaccctcacagatggtggcaaacgccttctgctcagccgcccagctccagcctcagcctgccactctgcttgggaaagctggggccttcccgccccctgccatacccagtgcccctgggagccaggcccgccctcgccccaatggggccccctggccccctgagccagcgcctgccccagctccagagttggacccctttgaggcccagtgggcggcattagaaggcaaagccactgtagagaaaccctccaaccccttttctggcgacctgcaaaagacattcgagattgaactg

SEQ ID NO: 8332 - DNA, 2583 bp, synthetic construct
  source 1..2583: mol_type = other DNA; note = Description of Artificial Sequence: Synthetic polynucleotide
atggcctcctgcccagactctgataatagctgggtgcttgctggctccgagagcctgccagtggagacactgggcccggcatccaggatggacccagaatctgagagagccctgcaggcccctcacagcccctccaagacagatgggaaagaattagctgggaccatggatggagaagggacgctcttccagactgaaagccctcagtctggcagcattctaacagaggagactgaggtcaagggcaccctggaaggtgatgtttgtggtgtggagcctcctggcccaggagacacagtagtccagggagacctgcaggagaccaccgtggtgacaggcctgggaccagacacacaggacctggaaggccagagccctccacagagcctgccttcaacccccaaagcagcttggatcagggaggagggccgctgctccagcagtgacgatgacaccgacgtggacatggagggtctgcggagacggcggggccgggaggccggcccacctcagcccatggtgcccctggctgtggagaaccaggctgggggtgagggtgcaggcggggagctgggcatctccctcaacatgtgcctccttggggccctggttctgcttggcctgggggtcctcctcttctcaggtggcctctcagagtctgagactgggcccatggaggaagtggagcggcaggtcctcccagaccccgaggtgctggaagctgtgggggacaggcaggatgggctaagggaacagctgcaggccccagtgcctcctgacagtgtccccagcctgcaaaacatgggtcttctgctggacaagctggccaaggagaaccaggacatccggctgctgcaggcccagctgcaggcccaaaaggaagagcttcagagcctgatgcaccagcccaaagggctagaggaggagaatgcccagctccggggggctctgcagcagggcgaagccttccagcgggctctggagtcagagctgcagcagctgcgggcccggctccaggggctggaggccgactgtgtccggggcccagatggggtgtgcctcagtgggggtagaggcccacagggtgacaaggccatcagggagcaaggccccagggagcaggagccagaactcagcttcctgaagcagaaggaacagctggaggctgaggcacaggcattaaggcaagagttagagaggcagcgacggctgctggggtctgtacagcaggatctggagaggagcttgcaggatgccagccgcggggacccagctcatgctggcttggctgagctgggccacagattggcccagaaactgcagggcctggagaactggggccaggaccctggggtctctgccaatgcctcaaaggcctggcaccagaagtcccacttccagaattctagggagtggagtggaaaggaaaagtggtgggatgggcagagagaccggaaggctgagcactggaaacataagaaggaagaatctggccgggaaaggaagaagaactggggaggtcaggaggacagggagccagcaggaaggtggaaggagggcaggccaagggtggaggagtcggggagcaagaaggagggcaagcgacagggcccgaaggaacccccaaggaaaagtggtagcttccactcctctggagaaaagcagaagcaacctcggtggagggaagggactaaggacagccatgaccccctgccatcctgggcagagctgttgaggcccaagtaccgggcaccccagggctgctcaggtgtggacgagtgtgcccggcaggagggcctgactttctttggcacagagctagccccagtgcggcaacaggagctggcctctctgctaagaacatacttggcacggctgccctgggctgggcagctgaccaaggagctacccctctcacctgctttctttggtgaggatggcatcttccgtcatgaccgcctccgcttccgggattttgtggatgccctggaggacagcttggaggaggtggctgtgcaacagacaggtgatgatgatgaagtagatgactttgaggacttcatcttcagccacttctttggagacaaagcactgaagaagagacttggagctgatgtctgtgctgtcctccggctctctggtccactcaaggaacagtatgctcaggagcatggcttgaacttccagagactcctggacaccagcacctacaaggaggcctttcggaaggacatgatccgctggggagaggagaaacgccaggctgacccaggcttcttttgcaggaagattgtggagggcatctcccagcccatctggctggtgagtgacacacggagagtgtctgacatccagtggtttcgggaggcctatggggccgtgacgcagacggtccgcgttgtagcgttggagcagagccgacagcagcggggctgggtgttcacgccaggggtggacgatgctgagtcagaatgtggcctggacaacttcggggactttgactgggtcatcgagaaccatggagttgaacagcgcctggaggagcagttggagaacctgatagaatttatccgctccagactt

SEQ ID NO: 8333 - DNA, 3108 bp, synthetic construct
  source 1..3108: mol_type = other DNA; note = Description of Artificial Sequence: Synthetic polynucleotide
atggaagcacgttctatgctggttccaccccaggcatctgtgtgcttcgaggatgtggctatggcattcacacaggaggagtgggaacagctggacctggcccagaggacactgtaccgagaggtgacactggagacctgggagcatattgtctccctggggcttttcctttccaaatctgatgtgatctctcagctggagcaagaagaggacctgtgcagggcagagcaggaggccccccgaggtaagagcaaagaggcggaaattaagagaatcaacaaggaactggccaacatccgctccaagttcaaaggagacaaagccttggatggctacagtaagaaaaaatatgtgtgtaaactgcttttcatcttcctgcttggccatgacattgactttgggcacatggaggctgtgaatctgttgagttccaataaatacacagagaagcaaataggttacctgttcatttctgtgctggtgaactcgaactcggagctgatccgcctcatcaacaacgccatcaagaatgacctggccagccgcaaccccaccttcatgtgcctggccctgcactgcatcgccaacgtgggcagccgggagatgggcgaggcctttgccgctgacatcccccgcatcctggtggccggggacagcatggacagtgtcaagcagagtgcggccctgtgcctccttcgactgtacaaggcctcgcctgacctggtgcccatgggcgagtggacggcgcgtgtggtacacctgctcaatgaccagcacatgggtgtggtcacggccgccgtcagcctcatcacctgtctctgcaagaagaacccagatgacttcaagacgtgcgtctctctggctgtgtcgcgcctgagccggatcgtctcctctgcctccaccgacctccaggactacacctactacttcgtcccagcaccctggctctcggtgaagctcctgcggctgctgcagtgctacccgcctccagaggatgcggctgtgaaggggcggctggtggaatgtctggagactgtgctcaacaaggcccaggagccccccaaatccaagaaggtgcagcattccaacgccaagaacgccatcctcttcgagaccatcagcctcatcatccactatgacagtgagcccaacctcctggttcgggcctgcaaccagctgggccagttcctgcagcaccgggagaccaacctgcgctacctggccctggagagcatgtgcacgctggccagctccgagttctcccatgaagccgtcaagacgcacattgacaccgtcatcaatgccctcaagacggagcgggacgtcagcgtgcggcagcgggcggctgacctcctctacgccatgtgtgaccggagcaatgccaagcagatcgtgtcggagatgctgcggtacctggagacggcagactacgccatccgcgaggagatcgtcctgaaggtggccatcctggccgagaagtacgccgtggactacagctggtacgtggacaccatcctcaacctcatccgcattgcgggcgactacgtgagtgaggaggtgtggtaccgtgtgctacagatcgtcaccaaccgtgatgacgtccagggctatgccgccaagaccgtctttgaggcgctccaggcccctgcctgtcacgagaacatggtgaaggttggcggctacatccttggggagtttgggaacctgattgctggggacccccgctccagccccccagtgcagttctccctgctccactccaagttccatctgtgcagcgtggccacgcgggcgctgctgctgtccacctacatcaagttcatcaacctcttccccgagaccaaggccaccatccagggcgtcctgcgggccggctcccagctgcgcaatgctgacgtggagctgcagcagcgagccgtggagtacctcaccctcagctcagtggccagcaccgacgtcctggccacggtgctggaggagatgccgcccttccccgagcgcgagtcgtccatcctggccaagctgaaacgcaagaaggggccaggggccggcagcgccctggacgatggccggagggaccccagcagcaacgacatcaacgggggcatggagcccacccccagcactgtgtcgacgccctcgccctccgccgacctcctggggctgcgggcagcccctcccccggcagcacccccggcttctgcaggagcagggaaccttctggtggacgtcttcgatggcccggccgcccagcccagcctggggcccacccccgaggaggccttcctcagcgagctggagccgcctgcccccgagagccccatggctttgctggctgacccagctccagctgctgacccaggtcctgaggacatcggccctcccattccggaagccgatgagttgctgaataagtttgtgtgtaagaacaacggggtcctgttcgagaaccagctgctgcagatcggagtcaagtcagagttccgacagaacctgggccgcatgtatctcttctatggcaacaagacctcggtgcagttccagaatttctcacccactgtggttcacccgggagacctccagactcatctggctgtgcagaccaagcgcgtggcggcgcaggtggacggcggcgcgcaggtgcagcaggtgctcaatatcgagtgcctgcgggacttcctgacgcccccgctgctgtccgtgcgcttccggtacggtggcgccccccaggccctcaccctgaagctcccagtgaccatcaacaagttcttccagcccaccgagatggcggcccaggatttcttccagcgctggaagcagctgagcctccctcaacaggaggcgcagaaaatcttcaaagccaaccaccccatggacgcagaagttactaaggccaagcttctggggtttggctctgctctcctggacaatgtggaccccaaccctgagaacttcgtgggggcggggatcatccagactaaagccctgcaggtgggctgtctgcttcggctggagcccaatgcccaggcccagatgtaccggctgaccctgcgcaccagcaaggagcccgtctcccgtcacctgtgtgagctgctggcacagcagttc

SEQ ID NO: 8334 - DNA, 1686 bp, synthetic construct
  source 1..1686: mol_type = other DNA; note = Description of Artificial Sequence: Synthetic polynucleotide
atggcctcggagagtgggaagctttggggtggccggtttgtgggtgcagtggaccccatcatggagaagttcaacgcgtccattgcctacgaccggcacctttgggaggtggatgttcaaggcagcaaagcctacagcaggggcctggagaaggcagggctcctcaccaaggccgagatggaccagatactccatggcctagacaaggtggctgaggagtgggcccagggcaccttcaaactgaactccaatgatgaggacatccacacagccaatgagcgccgcctgaaggagctcattggtgcaacggcagggaagctgcacacgggacggagccggaatgaccaggtggtcacagacctcaggctgtggatgcggcagacctgctccacgctctcgggcctcctctgggagctcattaggaccatggtggatcgggcagaggcggaacgtgatgttctcttcccggggtacacccatttgcagagggcccagcccatccgctggagccactggattctgagccacgccgtggcactgacccgagactctgagcggctgctggaggtgcggaagcggatcaatgtcctgcccctggggagtggggccattgcaggcaatcccctgggtgtggaccgagagctgctccgagcagaactcaactttggggccatcactctcaacagcatggatgccactagtgagcgggactttgtggccgagttcctgttctgggcttcgctgtgcatgacccatctcagcaggatggccgaggacctcatcctctactgcaccaaggaattcagcttcgtgcagctctcagatgcctacagcacgggaagcagcctgatgccccagaagaaaaaccccgacagtttggagctgatccggagcaaggctgggcgtgtgtttgggcggtgtgccgggctcctgatgaccctcaagggacttcccagcacctacaacaaagacttacaggaggacaaggaagctgtgtttgaagtgtcagacactatgagtgccgtgctccaggtggccactggcgtcatctctacgctgcagattcaccaagagaacatgggacaggctctcagccccgacatgctggccactgaccttgcctattacctggtccgcaaagggatgccattccgccaggcccacgaggcctccgggaaagctgtgttcatggccgagaccaagggggtcgccctcaaccagctgtcactgcaggagctgcagaccatcaggaaggatgccaattctgcgcttctcagtaactacgaggtatttcagttactaactgatctgaaagagcagcgtaaagaaagtggaaagaataaacacagctctgggcaacagaacttgaacactatcacctatgaaacgttaaaatacatatcaaaaacaccatgcaggcaccagagtcctgaaattgtcagagaatttctcacagcattgaaaagccacaagttgaccaaagctgagaagctccagctgctgaaccaccggcctgtgactgctgtggagatccagctgatggtggaagagagtgaagagcggctcacggaggagcagattgaagctcttctccacaccgtcaccagcattctgcctgcagagccagaggctgagcagaagaagaatacaaacagcaatgtggcaatggacgaagaggacccagca

SEQ ID NO: 8335 - DNA, 3051 bp, synthetic construct; identical to SEQ ID NO: 8276
  source 1..3051: mol_type = other DNA; note = Description of Artificial Sequence: Synthetic polynucleotide

SEQ ID NO: 8336 - DNA, 1446 bp, synthetic construct
  source 1..1446: mol_type = other DNA; note = Description of Artificial Sequence: Synthetic polynucleotide
atgggcgagaccatgtcaaagaggctgaagctccacctgggaggggaggcagaaatggaggaacgggcgttcgtcaaccccttcccggactacgaggccgccgccggggcgctgctcgcctccggagcggccgaagagacaggctgtgttcgtcccccggcgaccacggatgagcccggcctcccttttcatcaggacgggaagcaaaaagaaaataatattcgttgtttaactacgattggacattttggttttgaatgtttgcccaatcagttggtgagcagatctatccgacaaggattcacttttaatattctctgtgtgggggagactggaattggaaaatcgacactgatagacacattgtttaatactaacttgaaagataacaaatcctcacatttttactcaaatgttggacttcaaattcagacatatgaacttcaggaaagcaatgttcagttgaaattgactgttgtggagacagtagggtatggtgatcaaatagacaaagaagccagctaccaaccaatagttgactacatagatgcccaatttgaggcctatcttcaagaagaactgaagattaaacgttccttgtttgagtaccatgattctcgcgtccacgtgtgtctttacttcatttcacctacaggacattccctgaagtctcttgatctattaacaatgaagaaccttgacagtaaggtgaatattataccactgattgccaaagcagacactatttctaaaaatgatttacagacgtttaagaataagataatgagtgaattgattagcaatggcatccagatatatcagctcccaacagatgaagaaactgctgctcaagcgaactcctcagttagtgggctgttaccctttgctgtggtagggagtacagatgaagtgaaagttggaaaaaggatggtcagaggccgtcactacccttggggagttttgcaagtggaaaatgaaaatcactgtgacttcgttaagctccgagatatgcttctttgtaccaatatggaaaatctaaaagaaaaaacccacactcagcactatgaatgttataggtaccaaaaactgcagaaaatgggctttacagatgtgggtccaaacaaccagccagttagttttcaagaaatctttgaagccaaaagacaagagttctatgatcaatgtcagagggaagaagaagagttgaaacagagatttatgcagcgagtcaaggagaaagaagcaacatttaaagaagctgaaaaagagctgcaggacaagttcgagcatcttaaaatgattcaacaggaggagataaggaagctcgaggaagagaaaaaacaactggaaggagaaatcatagatttttataaaatgaaagctgcctccgaagcactgcagactcagctgagcaccgatacaaagaaagacaaacatcgtaagaaa

SEQ ID NO: 8337 - DNA, 570 bp, synthetic construct
  source 1..570: mol_type = other DNA; note = Description of Artificial Sequence: Synthetic polynucleotide
atggcggctcccttggtcctggtgctggtggtggctgtgacagtgcgggcggccttgttccgctccagtctggccgagttcatttccgagcgggtggaggtggtgtccccactgagctcttggaagagagtggttgaaggcctttcactgttggacttgggagtatctccgtattctggagcagtatttcatgaaactccattaataatatacctctttcatttcctaattgactatgctgaattggtgtttatgataactgatgcactcactgctattgccctgtattttgcaatccaggacttcaataaagttgtgtttaaaaagcagaaactcctcctagaactggaccagtatgccccagatgtggccgaactcatccggacccctatggaaatgcgttacatccctttgaaagtggccctgttctatctcttaaatccttacacgattttgtcttgtgttgccaagtctacctgtgccatcaacaacaccctcattgctttcttcattttgactacgataaaagacataaccagtgcggtgcaatccaagcgaagaaaatccaag

SEQ ID NO: 8338 - DNA, 3408 bp, synthetic construct
  source 1..3408: mol_type = other DNA; note = Description of Artificial Sequence: Synthetic polynucleotide
atgcgaccctccgggacggccggggcagcgctcctggcgctgctggctgcgctctgcccggcgagtcgggctctggaggaaaagaaagtttgccaaggcacgagtaacaagctcacgcagttgggcacttttgaagatcattttctcagcctccagaggatgttcaataactgtgaggtggtccttgggaatttggaaattacctatgtgcagaggaattatgatctttccttcttaaagaccatccaggaggtggctggttatgtcctcattgccctcaacacagtggagcgaattcctttggaaaacctgcagatcatcagaggaaatatgtactacgaaaattcctatgccttagcagtcttatctaactatgatgcaaataaaaccggactgaaggagctgcccatgagaaatttacaggaaatcctgcatggcgccgtgcggttcagcaacaaccctgccctgtgcaacgtggagagcatccagtggcgggacatagtcagcagtgactttctcagcaacatgtcgatggacttccagaaccacctgggcagctgccaaaagtgtgatccaagctgtcccaatgggagctgctggggtgcaggagaggagaactgccagaaactgaccaaaatcatctgtgcccagcagtgctccgggcgctgccgtggcaagtcccccagtgactgctgccacaaccagtgtgctgcaggctgcacaggcccccgggagagcgactgcctggtctgccgcaaattccgagacgaagccacgtgcaaggacacctgccccccactcatgctctacaaccccaccacgtaccagatggatgtgaaccccgagggcaaatacagctttggtgccacctgcgtgaagaagtgtccccgtaattatgtggtgacagatcacggctcgtgcgtccgagcctgtggggccgacagctatgagatggaggaagacggcgtccgcaagtgtaagaagtgcgaagggccttgccgcaaagtgtgtaacggaataggtattggtgaatttaaagactcactctccataaatgctacgaatattaaacacttcaaaaactgcacctccatcagtggcgatctccacatcctgccggtggcatttaggggtgactccttcacacatactcctcctctggatccacaggaactggatattctgaaaaccgtaaaggaaatcacagggtttttgctgattcaggcttggcctgaaaacaggacggacctccatgcctttgagaacctagaaatcatacgcggcaggaccaagcaacatggtcagttttctcttgcagtcgtcagcctgaacataacatccttgggattacgctccctcaaggagataagtgatggagatgtgataatttcaggaaacaaaaatttgtgctatgcaaatacaataaactggaaaaaactgtttgggacctccggtcagaaaaccaaaattataagcaacagaggtgaaaacagctgcaaggccacaggccaggtctgccatgccttgtgctcccccgagggctgctggggcccggagcccagggactgcgtctcttgccggaatgtcagccgaggcagggaatgcgtggacaagtgcaaccttctggagggtgagccaagggagtttgtggagaactctgagtgcatacagtgccacccagagtgcctgcctcaggccatgaacatcacctgcacaggacggggaccagacaactgtatccagtgtgcccactacattgacggcccccactgcgtcaagacctgcccggcaggagtcatgggagaaaacaacaccctggtctggaagtacgcagacgccggccatgtgtgccacctgtgccatccaaactgcacctacggatgcactgggccaggtcttgaaggctgtccaacgaatgggcctaagatcccgtccatcgccactgggatggtgggggccctcctcttgctgctggtggtggccctggggatcggcctcttcatgcgaaggcgccacatcgttcggaagcgcacgctgcggaggctgctgcaggagagggagcttgtggagcctcttacacccagtggagaagctcccaaccaagctctcttgaggatcttgaaggaaactgaattcaaaaagatcaaagtgctgggctccggtgcgttcggcacggtgtataagggactctggatcccagaaggtgagaaagttaaaattcccgtcgctatcaaggaattaagagaagcaacatctccgaaagccaacaaggaaatcctcgatgaagcctacgtgatggccagcgtggacaacccccacgtgtgccgcctgctgggcatctgcctcacctccaccgtgcagctcatcacgcagctcatgcccttcggctgcctcctggactatgtccgggaacacaaagacaatattggctcccagtacctgctcaactggtgtgtgcagatcgcaaagggcatgaactacttggaggaccgtcgcttggtgcaccgcgacctggcagccaggaacgtactggtgaaaacaccgcagcatgtcaagatcacagattttgggctggccaaactgctgggtgcggaagagaaagaataccatgcagaaggaggcaaagtgcctatcaagtggatggcattggaatcaattttacacagaatctatacccaccagagtgatgtctggagctacggggtgactgtttgggagttgatgacctttggatccaagccatatgacggaatccctgccagcgagatctcctccatcctggagaaaggagaacgcctccctcagccacccatatgtaccatcgatgtctacatgatcatggtcaagtgctggatgatagacgcagatagtcgcccaaagttccgtgagttgatcatcgaattctccaaaatggcccgagacccccagcgctaccttgtcattcagtgcacagaagccaaaaagcattgctggtatttcgaaggactctatccaacctattatatatgccgctcctacgaggactgctgtggctccaggtgctgtgtgcgggccctctccatacagaggctgtggtacttctggttccttctgatgatgggcgtgcttttctgctgcggagccggcttcttcatccggaggcgcatgtaccccccgccgctgatcgaggagccagccttcaatgtgtcctacaccaggcagcccccaaatcccggcccaggagcccagcagccggggccgccctattacaccgacccaggaggaccggggatgaaccctgtcgggaattccatggcaatggctttccaggtcccacccaactcaccccaggggagtgtggcctgcccgccccctccagcctactgcaacacgcctccgcccccgtacgaacaggtagtgaaggccaag

SEQ ID NO: 8339 - DNA, 1539 bp, synthetic construct
  source 1..1539: mol_type = other DNA; note = Description of Artificial Sequence: Synthetic polynucleotide
atggcggaggcgcctcctgtctcaggtacttttaaattcaatacagatgctgctgaattcattcctcaggagaaaaaaaattctggtctaaattgtgggactcaaaggagactagactctaataggattggtagaagaaattacagttcaccacctccctgtcacctttccaggcaggtcccttatgatgaaatctctgctgttcatcagcatagttatcatccgtcaggaagcaaacctaagagtcagcagacgtctttccagtcctctccttgtaataaatcgcccaagagccatggccttcagaatcaaccttggcagaaattgaggaatgagaagcaccatatcagagtcaagaaagcacagagtcttgctgagcagacctcagatacagctggattagagagctcgaccagatcagagagtgggacagacctcagagagcatagtccttctgagagtgagaaggaagttgtgggtgcagatcccaggggagcaaaacccaaaaaagcaacacagtttgtatacagctatggtagaggaccaaaagtcaaggggaaactcaaatgtgaatggagtaaccgaacaactccaaaaccggaggatgctggacccgaaagtaccaaacctgtgggggttttccaccctgactcttcagaggcatcctctagaaaaggagtattggatgggtatggagccagacgaaatgagcagagaagatacccacagaaaaggcctccctgggaagtggagggggccaggccacgaccaggcagaaatccaccaaaacaggagggccaccgacatacaaacgcaggacacagaaacaacatgggccccattccaaaggatgacctcaatgaaagaccagcaaaatctacctgtgacagtgagaacttggcagtcatcaacaagtcttccaggagggttgaccaagagaaatgcactgtacggaggcaggatcctcaagtagtatctcctttctcccgaggcaaacagaaccatgtgctaaagaatgtggaaacgcacacagcagacaaatgcagcccaaactacctgggcagtgactggtacaacacatggaggatggaaccttacaacagcagctgctgcaacaagtataccacctaccttcctcggctgcctaaggaggccaggatggagacagcagttcgaggaatgcccttggaatgccctcctaggccggagcggctcaatgcctacgagcgcgaagtgatggtgaacatgctgaactcactgtcgcggaaccagcagctgccgcggatcacgccccgatgcgggtgcgtggacccgctgcccggccgcctgcccttccatggttacgaaagtgcttgctcgggccgccactactgtctgcgcgggatggactactacgccagcggggcgccctgcaccgaccgccgcctgcggccttggtgccgggagcaaccgactatgtgtacctccctacgagcaccggcccggaatgcagtgtgctgttacaactcccccgccgtcatactacccatatccgaacct

SEQ ID NO: 8340 - DNA, 3174 bp, synthetic construct
  source 1..3174: mol_type = other DNA; note = Description of Artificial Sequence: Synthetic polynucleotide
atggcggcggaaacgctgctgtccagtttgttaggactgctgcttctgggactcctgttacccgcaagtctgaccggcggtgtcgggagcctgaacctggaggagctgagtgagatgcgttatgggatcgagatcctgccgttgcctgtcatgggagggcagagccaatcttcggacgtggtgattgtctcctctaagtacaaacagcgctatgagtgtcgcctgccagctggagctattcacttccagcgtgaaagggaggaggaaacacctgcttaccaagggcctgggatccctgagttgttgagcccaatgagagatgctccctgcttgctgaagacaaaggactggtggacatatgaattctgttatggacgccacatccagcaataccacatggaagattcagagatcaaaggtgaagtcctctatctcggctactaccaatcagccttcgactgggatgatgaaacagccaaggcctccaagcagcatcgtcttaaacgctaccacagccagacctatggcaatgggtccaagtgcgaccttaatgggaggccccgggaggccgaggttcggggttgtactgaacgctttgtgtccagcccggaggagattctggatgtgattgatgaagggaaatcaaatcgtcatgtggctgtcaccaacatgaatgaacacagctctcggagccacagcatcttcctcatcaacatcaagcaggagaacatggaaacggagcagaagctcagtgggaagctgtatctggtggacctggcagggagtgagaaggtcagcaagactggagcagagggagccgtgctggacgaggcaaagaatatcaacaagtcactgtcagctctgggcaatgtgatctccgcactggctgagggcactaaaagctatgttccatatcgtgacagcaaaatgacaaggattctccaggactctctcgggggaaactgccggacgactatgttcatctgttgctcaccatccagttataatgatgcagagaccaagtccaccctgatgtttgggcagcgggcaaagaccattaagaacactgcctcagtaaatttggagttgactgctgagcagtggaagaagaaatatgagaaggagaaggagaagacaaaggcccagaaggagacgattgcgaagctggaggctgagctgagccggtggcgcaatggagagaatgtgcctgagacagagcgcctggctggggaggaggcagccctgggagccgagctctgtgaggagacccctgtgaatgacaactcatccatcgtggtgcgcatcgcgcccgaggagcggcagaaatacgaggaggagatccgccgtctctataagcagcttgacgacaaggatgatgaaatcaaccaacaaagccaactcatagagaagctcaagcagcaaatgctggaccaggaagagctgctggtgtccacccgaggagacaacgagaaggtccagcgggagctgagccacctgcaatcagagaacgatgccgctaaggatgaggtgaaggaagtgctgcaggccctggaggagctggctgtgaactatgaccagaagtcccaggaggtggaggagaagagccagcagaaccagcttctggtggatgagctgtctcagaaggtggccaccatgctgtccctggagtctgagttgcagcggctacaggaggtcagtggacaccagcgaaaacgaattgctgaggtgctgaacgggctgatgaaggatctgagcgagttcagtgtcattgtgggcaacggggagattaagctgccagtggagatcagtggggccatcgaggaggagttcactgtggcccgactctacatcagcaaaatcaaatcagaagtcaagtctgtggtcaagcggtgccggcagctggagaacctccaggtggagtgtcaccgcaagatggaagtgaccgggcgggagctctcatcctgccagctcctcatctctcagcatgaggccaagatccgctcgcttacggaatacatgcagagcgtggagctaaagaagcggcacctggaagagtcctatgactccttgagcgatgagctggccaagctccaggcccaggaaactgtgcatgaagtggccctgaaggacaaggagcctgacactcaggatgcagatgaagtgaagaaggctctggagctgcagatggagagtcaccgggaggcccatcaccggcagctggcccggctccgggacgagatcaacgagaagcagaagaccattgatgagctcaaagacctaaatcagaagctccagttagagctagagaagcttcaggctgactacgagaagctgaagagcgaagaacacgagaagagcaccaagctgcaggagctgacatttctgtacgagcgacatgagcagtccaagcaggacctcaagggtctggaggagacagttgcccgggaactccagaccctccacaaccttcgcaagctgttcgttcaagacgtcacgactcgagtcaagaaaagtgcagaaatggagcccgaagacagtggggggattcactcccaaaagcagaagatttcctttcttgagaacaacctggaacagcttacaaaggttcacaaacagctggtacgtgacaatgcagatctgcgttgtgagcttcctaaattggaaaaacgacttagggctacggctgagagagttaaggccctggagggtgcactgaaggaggccaaggagggcgccatgaaggacaagcgccggtaccagcaggaggtggaccgcatcaaggaggccgttcgctacaagagctcgggcaaacggggccattctgcccagattgccaaacccgtccggcctggccactacccagcatcctcacccaccaacccctatggcacccggagccctgagtgcatcagttacaccaacagcctcttccagaactaccagaatctctacctgcaggccacacccagctccacctcagatatgtactttgcaaactcctgtaccagcagtggagccacatcttctggcggccccttggcttcctaccagaaggccaacatggacaatggaaatgccacagatatcaatgacaataggagtgacctgccgtgtggctatgaggctgaggaccaggccaagcttttccctctccaccaagagacagcagccagc

SEQ ID NO: 8341 - DNA, 1128 bp, synthetic construct
  source 1..1128: mol_type = other DNA; note = Description of Artificial Sequence: Synthetic polynucleotide
atgaagcttgctgacagcgtaatggcagggaaagcttccgacggctccatcaaatggcagctctgctacgacatctcggccagaacttggtggatggatgaatttcatcctttcatcgaagcacttctgccccacgtccgagcctttgcctacacatggttcaacctgcaggcccgaaaacgaaaatacttcaaaaaacatgaaaagcgtatgtcaaaagaagaagagagagccgtgaaggatgaattgctaagtgaaaaaccagaggtcaagcagaagtgggcatctcgacttctggcaaagttgcggaaagatatccgacccgaatatcgagaggattttgttcttacagttacagggaaaaaacctccatgttgtgttctttccaacccagaccagaaaggcaagatgcgaagaattgactgcctccgccaggcagataaagtctggaggttggaccttgttatggtgattttgtttaaaggtattccgctggaaagtactgatggcgagcgccttgtaaagtccccacaatgctctaatccagggctctgtgtccaaccccatcacataggggtttctgttaaggaactcgatttatatttggcatactttgtgcatgcagcagtaattagtgaatgccaaaggcagcaactggaggctgtgagctactcctctcgatatgctctgggcctcttttatgaagctggtacgaagattgatgtcccttgggctgggcagtacatcaccagtaatccctgcatacgcttcgtctccattgataataagaagcgcaatatagagtcatcagaaattgggccttccctcgtgattcacaccactgtcccatttggagttacatacttggaacacagcattgaggatgtgcaagagttagtcttccagcagctggaaaacattttgccgggtttgcctcagccaattgctaccaaatgccaaaaatggagacattcacaggttacaaatgctgctgccaactgtcctggccaaatgactctgcatcacaaacctttccttgcatgtggaggggatggatttactcagtccaactttgatggctgcatcacttctgccctatgtgttctggaagctttaaagaattatatt

SEQ ID NO: 8342 - DNA, 1482 bp, synthetic construct
  source 1..1482: mol_type = other DNA; note = Description of Artificial Sequence: Synthetic polynucleotide
atgatgttaagaggaaacctgaagcaagtgcgcattgagaaaaacccggcccgccttcgcgccctggagtccgcggtgggcgagagcgagccggcggccgcggcagccatggcgctcgctcttgccggggagccggcaccgcccgcgcccgcgcctccagaggaccacccggacgaggagatggggttcactatcgacatcaagagtttcctcaagccgggcgagaagacgtacacgcagcgctgccgcctcttcgtgggaaatctgcccaccgacatcacggaggaggacttcaagaggctcttcgaacgctatggcgagcccagcgaagtcttcatcaaccgggaccgtggcttcggcttcatccgcttggaatccagaaccctggctgaaattgcaaaagcagagctggacggcaccattctcaagagcagacctctacggattcgcttcgctacacatggagcagccttgactgtcaagaacctttctccagttgtttccaatgagctgctagagcaagcattttctcagtttggtccagtagagaaagctgttgtggttgtggatgatcgcggtagagctacaggaaaaggttttgtagagtttgcagcaaaacctcctgcacgaaaggctctggaaagatgtggtgatggggcattcttgctaacaacgacccctcgtccagtcattgtggaacccatggagcagtttgatgatgaagatggcttgccagagaagctgatgcagaaaactcaacaatatcataaggaaagagaacaaccaccacgttttgctcaacctgggacatttgaatttgagtatgcatctcgatggaaggctcttgatgaaatggaaaagcagcagcgtgagcaggttgatagaaacatcagagaagccaaagagaaactggaggcagaaatggaagcagctaggcatgaacaccaattaatgctaatgaggcaagatctaatgaggcgtcaagaagaactcagacgcttggaagaactcagaaaccaagagttgcaaaaacggaagcaaatacaactaagacatgaagaggagcatcggcggcgtgaggaagaaatgatccgacacagagaacaggaggaactgaggcgacagcaagagggctttaagccaaactacatggaaaatgaaggaatcgtgtctcctagtgacctggaccttgtcatgtcagaagggttgggcatgcggtatgcattcattggacccctggaaaccatgcatctcaatgcagaaggtatgttaagctactgcgacagatacagcgaaggcataaaacatgtcctacagacttttggacccattccagagttttccagggccactgctgagaaggttaaccaggacatgtgcatgaaggtccctgatgacccggagcacttagctgccaggaggcagtggagggacgagtgcctcatgagactcgccaagttgaagagtcaagtgcagccccag

SEQ ID NO: 8343 - DNA, 1842 bp, synthetic construct
  source 1..1842: mol_type = other DNA; note = Description of Artificial Sequence: Synthetic polynucleotide
atgaaagagactatacaagggaccgggtcctgggggcctgagcctcctggacccggcatacccccagcttactcaagtcccaggcgggagcgtcttcgttggcccccacctcccaaaccccgactcaagtcaggtggagggtttgggccagatcctgggtcagggaccacagtgccagccagacgcctccctgtcccccgaccctcttttgatgcctcagcaagtgaagaggaggaagaagaggaggaggaggaggatgaagatgaagaggaggaagtggcagcttggaggctgcccccaagatggagtcagctgggaacctcccagcggccccgcccttcccgccccactcatcgaaaaacctgctcacagcgccgccgccgagccatgagagccttccggatgctgctctactcaaaaagcacctcgctgacattccactggaagctttgggggcgccaccggggccggcggcggggcctcgcacaccccaagaaccatctttcaccccagcaagggggtgcgacgccacaggtgccatccccctgttgtcgttttgactccccccgggggccacctccaccccggctgggtctgctaggtgctctcatggctgaggatggggtgagagggtctccaccagtgccctctgggccccccatggaggaagatggactcaggtggactccaaagtctcctctggaccctgactcgggcctcctttcatgtactctgcccaacggttttgggggacaatctgggccagaaggggagcgcagcttggcaccccctgatgccagcatcctcatcagcaatgtgtgcagcatcggggaccatgtggcccaggagctttttcagggctcagatttgggcatggcagaagaggcagagaggcctggggagaaagccggccagcacagccccctgcgagaggagcatgtgacctgcgtacagagcatcttggacgaattccttcaaacgtatggcagcctcatacccctcagcactgatgaggtagtagagaagctggaggacattttccagcaggagttttccaccccttccaggaagggcctggtgttgcagctgatccagtcttaccagcggatgccaggcaatgccatggtgaggggcttccgagtggcttataagcggcacgtgctgaccatggatgacttggggaccttgtatggacagaactggctcaatgaccaggtgatgaacatgtatggagacctggtcatggacacagtccctgaaaaggtgcatttcttcaatagtttcttctatgataaactccgtaccaagggttatgatggggtgaaaaggtggaccaaaaacacccggcactacgtgggctcagcagctgcttttgcagggacaccagagcatggacaattccaaggcagtcctggtggtgcctatgggactgctcagcccccacctcactatgggcccacacagccagcttatagtcctagtcagcagctcagagctccttcggcattccctgcagtgcagtacctatctcagccacagccacagccctatgctgtgcatggccactttcagcccactcagacaggtttcctccagcctggtggtgccctgtccttgcaaaagcagatggaacatgctaaccagcagactggcttctccgactcatcctctctgcgccccatgcacccccaggctctgcatccagcccctggactccttgcttccccccagctccctgtgcagatgcagccagcaggaaagtcgggctttgcagctaccagccaacctggccctcggctccccttcatccaacacagccagaacccgcgattctaccacaag

SEQ ID NO: 8344 - DNA, 918 bp, synthetic construct
  source 1..918: mol_type = other DNA; note = Description of Artificial Sequence: Synthetic polynucleotide
atggtgaacctggcggccatggtgtggcgccggcttctgcggaagaggtgggtgctcgccctggtcttcgggctgtcgctcgtctacttcctcagcagcaccttcaagcaggatcttgatgctggtgtaagtgaacattcaggtgattggttggatcaggattcagtttcagatcagtttagtgtagaatttgaagttgaatctctcgactcagaagattatagccttagtgaagaaggacaagaactctcagatgaagatgatgaggtatatcaagttactgtgtatcaggcaggggagagtgatacagattcatttgaagaagatcctgaaatttccttagctgactattggaaatgcacttcatgcaatgaaatgaatcccccccttccatcacattgcaacagatgttgggcccttcgtgagaattggcttcctgaagataaagggaaagataaaggggaaatctctgagaaagccaaactggaaaactcaacacaagctgaagagggctttgatgttcctgattgtaaaaaaactatagtgaatgattccagagagtcatgtgttgaggaaaatgatgataaaattacacaagcttcacaatcacaagaaagtgaagactattctcagccatcaacttctagtagcattatttatagcagccaagaagatgtgaaagagtttgaaagggaagaaacccaagacaaagaagagagtgtggaatctagtttgccccttaatgccattgaaccttgtgtgatttgtcaaggtcgacctaaaaatggttgcattgtccatggcaaaacaggacatcttatggcctgctttacatgtgcaaagaagctaaagaaaaggaataagccctgcccagtatgtagacaaccaattcaaatgattgtgctaacttatttcccc

SEQ ID NO: 8345 - DNA, 1608 bp, synthetic construct
  source 1..1608: mol_type = other DNA; note = Description of Artificial Sequence: Synthetic polynucleotide
atggacgcgccgcgcgcctcggcggccaagcccccgaccgggaggaagatgaaggctcgtgctcccccacctcctggaaaggctgccactctgcatgtgcacagtgaccagaagcccccccacgatggggccctcgggtcgcagcagaacttggttcgcatgaaggaggcgctgagggccagcaccatggacgtcaccgtggtcctgcctagtgggctggagaagaggagcgtgctcaatgggagccatgcgatgatggacctactggttgaactttgccttcagaaccacctgaatccatcccaccatgcccttgaaattcggtcttcagaaacccaacaacctttgagttttaagccaaatactttgattgggaccctgaatgtgcatactgtgtttctgaaagaaaaagttcctgaagagaaggttaagcctggtccccctaaggtgcctgagaaatctgtgcgtttggtcgtgaattacctgcggacacaaaaagctgttgtgcgtgtgagccctgaggttcctctccagaatattctcccagtcatttgtgcaaagtgtgaggtcagcccagagcacgtggttctcctcagggacaacattgccggagaggagctggagctgtccaagtccctgaacgagctcgggataaaggagctctacgcgtgggacaacagaagagaaacctttaggaaatcatcacttggcaatgatgagacagataaagagaagaaaaaatttctgggatttttcaaagttaataaaagaagcaatagtaaggctgagcagctcgtgctgtcgggtgcagacagcgatgaggacacctccagggctgccccaggaaggggtttgaacggctgtttaacgacccccaactccccatccatgcactcacgttctcttacgctgggtccatccctctcgctgggcagcatctcaggggtgtccgtgaagtcggagatgaagaagcgccgagcccctcctcctccaggttcagggccacctgtgcaagacaaggcatcggaaaaggggctgttaccctttgctgtggtagggagtacagatgaagtgaaagttggaaaaaggatggtcagaggccgtcactacccttggggagttttgcaagtggaaaatgaaaatcactgtgacttcgttaagctccgagatatgcttctttgtaccaatatggaaaatctaaaagaaaaaacccacactcagcactatgaatgttataggtaccaaaaactgcagaaaatgggctttacagatgtgggtccaaacaaccagccagttagttttcaagaaatctttgaagccaaaagacaagagttctatgatcaatgtcagagggaagaagaagagttgaaacagagatttatgcagcgagtcaaggagaaagaagcaacatttaaagaagctgaaaaagagctgcaggacaagttcgagcatcttaaaatgattcaacaggaggagataaggaagctcgaggaagagaaaaaacaactggaaggagaaatcatagatttttataaaatgaaagctgcctccgaagcactgcagactcagctgagcaccgatacaaagaaagacaaacatcgtaagaaa

SEQ ID NO: 8346 - DNA, 588 bp, synthetic construct
  source 1..588: mol_type = other DNA; note = Description of Artificial Sequence: Synthetic polynucleotide
atgaagctggccctgctcctgccctgggcgtgttgctgcctctgcgggtcggcgctggccaccggcttcctctatcccttctcggccgcagctctgcagcagcacggctaccccgagcccggcgccggctcccctggcagcggctacgcgagccgccggcactggtgccatcacacagtgacacggacggtgtcctgccaggtgcagaatggctcggagacggtggtccagcgcgtgtaccagagctgccggtggccggggccctgcgccaacctcgtaagttacaggactctgatcagacccacctacagagtgtcctaccgcacggtgacggtgctggagtggagatgctgccctggcttcaccgggagcaactgtgatgaggaatgcatgaactgcacccggctcagtgacatgagtgagcgactgaccacactggaggccaagattatttgcatgggtgcaaaagaaaatggtttgccgctggagtatcaagagaagttaaaagcaatagaaccaaatgactatacaggaaaggtctcagaagaaattgaagacatcatcaaaaagggggaaacacaaactctt

SEQ ID NO: 8347 - DNA, 2439 bp, synthetic construct
  source 1..2439: mol_type = other DNA; note = Description of Artificial Sequence: Synthetic polynucleotide
atggcagcggaaacgcagacactgaactttgggcctgaatggctccgagctctgtccagtggtgggagtattacatcccctcctctttctccagcattgccgaagtataaattagcagattatcgttacggcagagaagaaatgttagcacttttccttaaagacaacaagataccttcagaccttctggataaagaatttctgcctatcctccaggaggaaccccttccaccattggctctggtaccctttacagaagaagaacagctcaaagaaattctcgaatgttctcacctattaacagttattaaaatggaagaagctggggatgaaattgtgagcaatgccatctcctacgctctatacaaagccttcagcaccagtgagcaagacaaggataactggaatgggcagctgaagcttctgctggagtggaaccagctggacttagccaatgatgagattttcaccaatgaccgccgatgggagtctgctgaccttcaagaagtcatgtttacggctctcataaaggacagacccaagtttgtccgcctctttctggagaatggcttgaacctacggaagtttctcacccatgatgtcctcactgaactcttctccaaccacttcagcacgcttgtgtaccggaatctgcagatcgccaagaattcctataatgatgccctcctcacgtttgtctggaaactggttgcgaacttccgaagaggcttccggaaggaagacagaaatggccgggacgagatggacatagaactccacgacgtgtctcctattactcggcaccccctgcaagctctcttcatctgggccattcttcagaataagaaggaactctccaaagtcatttgggagcagaccaggggctgcactctggcagccctgggagccagcaagcttctgaagactctggccaaagtgaagaacgacatcaatgctgctggggagtccgaggagctggctaatgagtacgagacccgggctgttgagctgttcactgagtgttacagcagcgatgaagacttggcagaacagctgctggtctattcctgtgaagcttggggtggaagcaactgtctggagctggcggtggaggccacagaccagcatttcatcgcccagcctggggtccagaattttctttctaagcaatggtatggagagatttcccgagacaccaagaactggaagattatcctgtgtctgtttattatacccttggtgggctgtggctttgtatcatttaggaagaaacctgtcgacaagcacaagaagctgctttggtactatgtggcgttcttcacctcccccttcgtggtcttctcctggaatgtggtcttctacatcgccttcctcctgctgtttgcctacgtgctgctcatggatttccattcggtgccacacccccccgagctggtcctgtactcgctggtctttgtcctcttctgtgatgaagtgagacagtggtacgtaaatggggtgaattattttactgacctgtggaatgtgatggacacgctggggcttttttacttcatagcaggaattgtatttcggctccactcttctaataaaagctctttgtattctggacgagtcattttctgtctggactacattattttcactctaagattgatccacatttttactgtaagcagaaacttaggacccaagattataatgctgcagaggatgctgatcgatgtgttcttcttcctgttcctctttgcggtgtggatggtggcctttggcgtggccaggcaagggatccttaggcagaatgagcagcgctggaggtggatattccgttcggtcatctacgagccctacctggccatgttcggccaggtgcccagtgacgtggatggtaccacgtatgactttgcccactgcaccttcactgggaatgagtccaagccactgtgtgtggagctggatgagcacaacctgccccggttccccgagtggatcaccatccccctggtgtgcatctacatgttatccaccaacatcctgctggtcaacctgctggtcgccatgtttggctacacggtgggcaccgtccaggagaacaatgaccaggtctggaagttccagaggtacttcctggtgcaggagtactgcagccgcctcaatatccccttccccttcatcgtcttcgcttacttctacatggtggtgaagaagtgcttcaagtgttgctgcaaggagaaaaacatggagtcttctgtctgctgtttcaaaaatgaagacaatgagactctggcatgggagggtgtcatgaaggaaaactaccttgtcaagatcaacacaaaagccaacgacacctcagaggaaatgaggcatcgatttagacaactggatacaaagcttaatgatctcaagggtcttctgaaagagattgctaataaaatcaaa

SEQ ID NO: 8348 - DNA, 3123 bp, synthetic construct; identical to SEQ ID NO: 8278
  source 1..3123: mol_type = other DNA; note = Description of Artificial Sequence: Synthetic polynucleotide

SEQ ID NO: 8349 - DNA, 2631 bp, synthetic construct
  source 1..2631: mol_type = other DNA; note = Description of Artificial Sequence: Synthetic polynucleotide
atgatcacctcggccgctggaattatttctcttctggatgaagatgaaccacagcttaaggaatttgcactacacaaattgaatgcagttgttaatgacttctgggcagaaatttccgagtccgtagacaaaatagaggttttatacgaagatgaaggtttccggagtcggcagtttgcagccttagtggcatctaaagtattttatcacctgggggcttttgaggagtctctgaattatgctcttggagcaggggacctcttcaatgtcaatgataactctgaatatgtggaaactattatagcaaaatgcattgatcactacaccaaacaatgtgtggaaaatgcagatttgcctgaaggagaaaaaaaaccaattgaccagagattggaaggcatcgtaaataaaatgttccagcgatgtctagatgatcacaagtataaacaggctattggcattgctctggagacacgaagactggacgtctttgaaaagaccatactggagtcgaatgatgtcccaggaatgttagcttatagccttaagctctgcatgtctttaatgcagaataaacagtttcggaataaagtactaagagttctagttaaaatctacatgaacttggagaaacctgatttcatcaatgtttgtcagtgcttaattttcttagatgatcctcaggctgtgagtgatatcttagagaaactggtaaaggaagacaacctcctgatggcatatcagatttgttttgatttgtatgaaagtgctagccagcagtttttgtcatctgtaatccagaatcttcgaactgttggcacccctattgcttctgtgcctggatccactaatacgggtactgttccgggatcagagaaagacagtgactcgatggaaacagaagaaaagacaagcagtgcatttgtaggaaagacaccagaagccagtccagagcctaaggaccagactttgaaaatgattaaaattttaagtggtgaaatggctattgagttacatctgcagttcttaatacgaaacaataatacagacctcatgattctaaaaaacacaaaggatgcagtacggaattctgtatgtcatactgcaaccgttatagcaaactcttttatgcactgtgggacaaccagtgaccagtttcttagagataatttggaatggttagccagagccactaactgggcaaaatttactgctacagccagtttgggtgtaattcataagggtcatgaaaaagaagcattacagttaatggcaacataccttcccaaggatacttctccaggatcagcctatcaggaaggtggaggtctctatgcactaggtcttattcatgccaatcatggtggtgatataattgactatctgcttaatcagcttaagaacgccagcaatgatgcaactttttcctgtacctgtgaggagcagtacgtgggtactttctgtgaagaatacgatgcttgccagaggaaaccttgccaaaacaacgcgagctgtattgatgcaaatgaaaagcaagatgggagcaatttcacctgtgtttgccttcctggttatactggagagctttgccagtccaagattgattactgcatcctagacccatgcagaaatggagcaacatgcatttccagtctcagtggattcacctgccagtgtccagaaggatacttcggatctgcttgtgaagaaaaggtggacccctgcgcctcgtctccgtgccagaacaacggcacctgctatgtggacggggtacactttacctgcaactgcagcccgggcttcacagggccgacctgtgcccagcttattgacttctgtgccctcagcccctgtgctcatggcacgtgccgcagcgtgggcaccagctacaaatgcctctgtgatccaggttaccatggcctctactgtgaggaggaatataatgagtgcctctccgctccatgcctgaatgcagccacctgcagggacctcgttaatggctatgagtgtgtgtgcctggcagaatacaaaggaacacactgtgaattgtacaaggatccctgcgctaacgtcagctgtctgaacggagccacctgtgacagcgacggcctgaatggcacgtgcatctgtgcacccgggtttacaggtgaagagtgcgacattgacataaatgaatgtgacagtaacccctgccaccatggtgggagctgcctggaccagcccaatggttataactgccactgcccgcatggttgggtgggagcaaactgtgagatccacctccaatggaagtccgggcacatggcggagagcctcaccaacatgccacggcactccctctacatcatcattggagccctctgcgtggccttcatccttatgctgatcatcctgatcgtggggatttgccgcatcagccgcattgaataccagggttcttccaggccagcctatgaggagttctacaactgccgcagcatcgacagcgagttcagcaatgccattgcatccatccggcatgccaggtttggaaagaaatcccggcctgcaatgtatgatgtgagccccatcgcctatgaagattacagtcctgatgacaaacccttggtcacactgattaaaactaaagatttg

SEQ ID NO: 8350 - DNA, 576 bp, synthetic construct
  source 1..576: mol_type = other DNA; note = Description of Artificial Sequence: Synthetic polynucleotide
atggcggagggcgcccagccgcatcagccgcctcagctcgggcccggcgccgccgcccggggcatgaagcgggagtcggagctggagctgccggtgcccggagcgggaggagacggagccgatcccggcctgagcaagcggccgcgcactgaggaggcggcggccgacggtggcggcgggatgcagggggaacttgaggttaagaacatggacatgaagccggggtcaaccctgaagatcacaggcagcatcgccgatggcactgatggctttgtaattaatctgggccaggggacagacaagctgaacctgcatttcaaccctcgcttcagcgaatccaccattgtctgcaactcattggacggcagcaactgggggcaagaacaacgggaagatcacctgtgcttcagcccagggtcagaggtcaagttcacagtgacctttgagagtgacaaattcaaggtgaagctgccagatgggcacgagctgacttttcccaacaggctgggtcacagccacctgagctacctgagcgtaaggggcgggttcaacatgtcctctttcaagttaaaagaa

SEQ ID NO: 8351 - DNA, 1326 bp, synthetic construct
  source 1..1326: mol_type = other DNA; note = Description of Artificial Sequence: Synthetic polynucleotide
atggaccggccggggttcgtggcagcgctggtggctggtggggtagcaggtgtttctgttgacttgatattatttcctctggataccattaaaaccaggctgcagagtccccaaggatttagtaaggctggtggttttcatggaatatatgctggcgttccttctgctgctattggatcctttcctaatgctgctgcattttttatcacctatgaatatgtgaagtggtttttgcatgctgattcatcttcatatttgacacctatgaaacatatgttggctgcctctgctggagaagtggttgcctgcctgattcgagttccatctgaagtggttaagcagagggcacaggtatctgcttctacaagaacatttcagattttctctaacatcttatatgaagagggtatccaagggttgtatcgaggctataaaagcacagttttaagagagatagaagaagtcagagatgccatggaaaatgaaatgagaacccagcttcgccgacaggcagctgcccacactgatcacttgcgagatgtccttagggtacaagaacaggaattgaagtctgaatttgagcagaacctgtctgagaaactctctgaacaagaattacaatttcgtcgtctcagtcaagagcaagttgacaactttactctggatataaatactgcctatgccagactcagaggaatcgaacaggctgttcagagccatgcagttgctgaagaggaagccagaaaagcccaccaactctggctttcagtggaggcattaaagtacagcatgaagacctcatctgcagaaacacctactatcccgctgggtagtgcagttgaggccatcaaagccaactgttctgataatgaattcacccaagctttaaccgcagctatccctccagagtccctgacccgtggggtgtacagtgaagagacccttagagcccgtttctatgctgttcaaaaactggcccgaagggtagcaatgattgatgaaaccagaaatagcttgtaccagtacttcctctcctacctacagtccctgctcctattcccacctcagcaactgaagccgcccccagagctctgccctgaggatataaacacatttaaattactgtcatatgcttcctattgcattgagcatggtgatctggagctagcagcaaagtttgtcaatcagctgaagggggaatccagacgagtggcacaggactggctgaaggaagcccgaatgaccctagaaacgaaacagatagtggaaatcctgacagcatatgccagcgccgtaggaataggaaccactcaggtgcagccagag

SEQ ID NO: 8352 - DNA, 828 bp, synthetic construct
  source 1..828: mol_type = other DNA; note = Description of Artificial Sequence: Synthetic polynucleotide
atgggagtccccaagttttacagatggatctcagagcggtatccctgtctcagcgaagtggtgaaagagcatcaggtgatctgcaactctttcaccatctgtaatgcggagatgcaggaagttggtgttggcctatatcccagtatctctttgctcaatcacagctgtgaccccaactgttcgattgtgttcaatgggccccacctcttactgcgagcagtccgagacatcgaggtgggagaggagctcaccatctgctacctggatatgctgatgaccagtgaggagcgccggaagcagctgagggaccagtactgctttgaatgtgactgtttccgttgccaaacccaggacaaggatgctgatatgctaactggtgatgagcaagtatggaaggaagttcaagaatccctgaaaaaaattgaagaactgaaggcacactggaagtgggagcaggttctggccatgtgccaggcaatcataagcagcaattctgaacggcttcccgatatcaacatctaccagctgaaggtgctcgactgcgccatggatgcctgcatcaacctcggcctgttggaggaagccttgttctatggtactcggaccatggagccatacaggatttttttcccaggaagccatcccgtcagaggggttcaagtgatgaaagttggcaaactgcagctacatcaaggcatgtttccccaagcaatgaagaatctgagactggcttttgatattatgagagtgacacatggcagagaacacagcctgattgaagatttgattctacttttagaagaatgcgacgccaacatcagagcatcc

SEQ ID NO: 8353 - DNA, 1437 bp, synthetic construct
  source 1..1437: mol_type = other DNA; note = Description of Artificial Sequence: Synthetic polynucleotide
atggccgccgccggcgcccggctcagccccggccccggctcggggctccgggggcggccgaggctctgcttccacccggggccgccgccactgctgccgctgctgctgctgttcctgctcctgctgccgccgccgccgctgctggccggcgccaccgccgctgcctcgcgggagcccgacagcccgtgccggctgaagaccgtcacggtgtccacactgcccgccctgcgggagagcgacatcggctggagcggcgcccgcgccggggccggggctgggaccggggccggagccgccgccgccgccgcgtccccgggctctcctggctctgccggcaccgccgccgagtcgcgcctcctgctctttgtgcgtaacgagctgccggggcgcatcgcggtgcaggacgacctggacaacaccgagctgcccttcttcaccctggagatgtctggcacagcagcggacatctcgctggtgcactggagacagcagtggctggagaatggcaccttgtacttccacgtctccatgagcagctccgggcagctggcccaagccaccgcccccactctccaggagccctcggagattgttgaggagcagatgcacatcctccacatttctgtgatgggtggcctcatcgcgctgctgctgctgctgctggtgttcaccgtggcgctgtacgcccagcgacgttggcagaagcgtcgccgcatcccccagaagagcgcaagcacagaagccactcatgagatccactacatcccatctgtgctgctgggtccccaggcgcgggagagcttccgttcatcccggctgcaaacccacaattccgtcattggcgtgcccatccgggagactcccatcctggatgactatgactgtgaggaggatgaggagccacctaggcgggccaaccatgtctcccgcgaggacgagtttggcagccaggtgacccacactctggacagtctgggacatccaggggaagagaaggtggactttgagaagaaagacccaagcctgcccaatgtgcaggtgaccaggctgacactcctgtcggaacaggctccggggcccgtcgtcatggatctcacaggggacctggctgttctgaaggaccaggtgtttgtcctgaaggaaggtgttgattacagagtgaagatctccttcaaggtccacagggagattgtcagcggcctcaagtgtctgcaccacacctaccgccggggcctgcgcgtggacaagaccgtctacatggtgggcagctatggcccgagcgcccaggagtatgagtttgtgactccggtggaggaagcgccgaggggtgcgctggtgcggggcccctatctggtggtgtccctcttcaccgacgatgacaggacgcaccacctgtcctgggagtggggtctctgcatctgccaggactggaaggac

SEQ ID NO: 8354 - DNA, 1917 bp, synthetic construct
  source 1..1917: mol_type = other DNA; note = Description of Artificial Sequence: Synthetic polynucleotide
atgctgcgattacagatgactgatggtcatataagttgcacagcagtagaatttagttatatgtcaaaaataagcctgaacacaccacctggaactaaagttaagctctcaggcattgttgacataaaaaatggattcctgctcttgaatgactctaacaccacagttcttggtggtgaagtggaacaccttattgagaaatgggagttacagagaagcttatcaaaacacaatagaagcaatattggaactgaaggtggaccaccgccttttgtgccttttggacagaagtgtgtatctcatgtccaagtggatagcagagaacttgatcgaagaaaaacattgcaagttacaatgcctgtcaaacctacaaatgataatgatgaatttgaaaagcaaaggacggctgctattgctgaagttgcaaagagcaaggaaaccaagacatttggaggaggtggtggtggtgctagaagtaatctcaatatgaatgctgctggtaaccgaaatagggaagttttacagaaagaaaagtcaaccaaatcagagggaaaacatgaaggtgtctatagagaactggttgatgagaaagctctgaagcacataacggaaatgggcttcagtaaggaagcatcgaggcaagctcttatggataatggcaacaacttagaagcagcactgaacgtacttcttacaagcaataaacagaaacctgttatgggtcctcctctgagaggtagaggaaaaggcagggggcgaataagatctgaagatgaagaggacctgggaaatgcaaggccatcagcaccaagcacattatttgatttcttggaatctaaaatgggaactttgaatgtggaagaacctaaatcacagccacagcagcttcatcagggacaatacagatcatcaaatactgagcaaaatggagtaaaagataataatcatctgagacatcctcctcgaaatgataccaggcagccaagaaatgaaaaaccgcctcgttttcaaagagactcccaaaattcaaagtcagttttagaaggcagtggattacctagaaatagaggttctgaaagaccaagtacttcttcagtatctgaagtatgggctgaagacagaatcaaatgtgatagaccgtattctagatatgacagaactaaagatacttcatatcctttaggttctcagcatagtgatggtgcttttaaaaaaagagataactctatgcaaagcagatcaggaaaaggtccctcctttgcagaggcaaaagaaaatccacttcctcaaggatctgtagattataataatcaaaaacgtggaaaaagagaaagccaaacatctattcctgattatttttatgacaggaaatcacaaacaataaataatgaagctttcagtggtataaaaattgaaaaacattttaatgtaaatactgattatcagaatccagttcgaagtaatagtttcattggtgttccaaatggagaagtagaaatgccactgaaaggaagacgaataggacctattaagccagcaggacctgtcacagctgtaccctgtgatgataaaatattttacaatagtgggcccaaacgaagatctgggccaattaagccagaaaaaatactagaatcatctattcctatggagtatgcaaaaatgtggaaacctggagatgaatgttttgcactttattgggaagacaacaagttttaccgggcagaagttgaagccctccattcttcgggtatgacagcagttgttaaattcattgactacggaaactatgaagaggtgctactgagcaatatcaagcccattcaaacagaggcatggggttatgatcatagctactacttcattgcaacctttattactgaccacatcagacatcatgctaaatacctgaatgca

SEQ ID NO: 8355 - DNA, 3141 bp, synthetic construct
  source 1..3141: mol_type = other DNA; note = Description of Artificial Sequence: Synthetic polynucleotide
atggcagatccaggaatgatgagtctttttggcgaggatgggaatattttcagtgaaggtcttgaaggcctcggagaatgtggttacccggaaaatccagtaaatcctatgggtcagcaaatgccaatagaccaaggctttgcctctttacagccatcccttcatcatccttcaactaatcaaaatcaaacaaagctgacacattttgatcactataatcagtatgaacaacaaaagatgcatctgatggatcagccgaacagaatgatgagcaacacccctgggaacggactcgcgtctccgcactcgcagtatcacacccctcccgttcctcaggtgccccatggtggcagtggtggcggtcagatgggtgtctaccctggcatgcagaatgagaggcatgggcaatcctttgtggacagcagctccatgtggggccccagggctgttcaggtaccagaccagatacgagccccctaccagcagcagcagccacagccgcagccaccgcagccggctccgtcggggccccctgcacagggccaccctcagcacatgcagcagatgggcagctatatggcacgtggggatttttccatgcagcagcatggtcagccacagcagaggatgagccagttttcccaaggccaagagggcctcaatcagggaaatccttttattgccacctcaggacctggccacttgtcccacgtgccccagcagagtcccagcatggcaccttccttgcgtcactcggtgcagcagttccatcaccacccctctactgctctccatggagaatccgttgcccacagtcccagattctccccgaatcctccccaacaaggggctgttaggccgcaaacccttaactttagttctcggagccagacagtcccctctcctactataaacaactcagggcagtattctcgatatccttacagtaacctaaatcagggattagttaacaatacagggatgaatcaaaatttaggccttacaaataatactccaatgaatcagtccgtaccaagataccccaatgctgtaggattcccatcaaacagtggtcaaggactaatgcaccagcagcccatccaccccagtggctcacttaaccaaatgaacacacaaactatgcatccttcacagcctcagggaacttatgcctctccacctcccatgtcacccatgaaagcaatgagtaatccagcaggcactcctcctccacaagtcaggccgggaagtgctgggataccaatggaagttggcagttatccaaatatgccccatcctcagccatctcaccagccccctggtgccatgggaatcggacagaggaatatgggccccagaaacatgcagcagtctcgtccatttataggcatgtcctcggcaccaagggaattgactgggcacatgaggccaaatggttgtcctggtgttggccttggagacccacaagcaatccaggaacgactgatacctggccaacaacatcctggtcaacagccatcttttcagcagttgccaacctgtcctccactgcagcctcacccgggcttgcaccaccagtcttcacctccacaccctcatcaccagccttgggcacagctccacccatcaccccagaacaccccgcagaaagtgcctgtgcatcagtttgacggtgagaacatgtatatgagcatgacagagccgagccaggactatgtgccagccagccagtcctaccctggtccaagcctggaaagtgaagacttcaacattccaccaattactcctccttccctcccagaccactcgctggtgcacctgaatgaagttgagtctggttaccattctctgtgtcaccccatgaaccataatggcctgctaccatttcatccacaaaacatggacctccctgaaatcacagtctccaatatgctgggccaggatggaacactgctttctaattccatttctgtgatgccagatatacgaaacccagaaggaactcagtacagttcccatcctcagatggcagccatgagaccaaggggccagcctgcagacatcaggcagcagccaggaatgatgccacatggccagctgactaccattaaccagtcacagctaagtgctcaacttggtttgaatatgggaggaagcaatgttccccacaactcaccatctccacctggaagcaagtctgcaactccttcaccatccagttcagtgcatgaagatgaaggcgatgatacctctaagatcaatggtggagagaagcggcctgcctctgatatggggaaaaaaccaaaaactcccaaaaagaagaagaagaaggatcccaatgagccccagaagcctgtgtctgcctatgcgttattctttcgtgatactcaggccgccatcaagggccaaaatccaaacgctacctttggcgaagtctctaaaattgtggcttcaatgtgggacggtttaggagaagagcaaaaacaggtctataaaaagaaaaccgaggctgcgaagaaggagtacctgaagcaactcgcagcatacagagccagccttgtatccaagagctacagtgaacctgttgacgtgaagacatctcaacctcctcagctgatcaattcgaagccgtcggtgttccatgggcccagccaggcccactcggccctgtacctaagttcccactatcaccaacaaccgggaatgaatcctcacctaactgccatgcatcctagtctccccaggaacatagcccccaagccgaataaccaaatgccagtgactgtctctatagcaaacatggctgtgtcccctcctcctcccctccagatcagcccgcctcttcaccagcatctcaacatgcagcagcaccagccgctcaccatgcagcagccccttgggaaccagctccccatgcaggtccagtctgccttacactcacccaccatgcagcaaggatttactcttcaacccgactatcagactattatcaatcctacatctacagctgcacaagttgtcacccaggcaatggagtatgtgcgttcggggtgcagaaatcctcccccacaaccggtggactggaataacgactactgcagtagtgggggcatgcagagggacaaagcactgtaccttact

SEQ ID NO: 8356 - DNA, 2241 bp, synthetic construct
  source 1..2241: mol_type = other DNA; note = Description of Artificial Sequence: Synthetic polynucleotide
atggcgagcgcctcgtaccacatttccaatttgctggaaaaaatgacatccagcgacaaggactttaggtttatggctacaaatgatttgatgacggaactgcagaaagattccatcaagttggatgatgatagtgaaaggaaagtagtgaaaatgattttgaagttattggaagataaaaatggagaggtacagaatttagctgtcaaatgtcttggtcctttagtgagtaaagtgaaagaataccaagtagagacaattgtagataccctctgcactaacatgctttctgataaagaacaacttcgagacatttcaagtattggtcttaaaacagtaattggagaacttcctccagcttccagtggctctgcattagctgctaatgtatgtaaaaagattactggacgtcttacaagtgcaatagcaaaacaggaagatgtctctgttcagctagaagccttggatattatggctgatatgttgagcagatgcactgggccaggtcttgaaggctgtccaacgaatgggcctaagatcccgtccatcgccactgggatggtgggggccctcctcttgctgctggtggtggccctggggatcggcctcttcatgcgaaggcgccacatcgttcggaagcgcacgctgcggaggctgctgcaggagagggagcttgtggagcctcttacacccagtggagaagctcccaaccaagctctcttgaggatcttgaaggaaactgaattcaaaaagatcaaagtgctgggctccggtgcgttcggcacggtgtataagggactctggatcccagaaggtgagaaagttaaaattcccgtcgctatcaaggaattaagagaagcaacatctccgaaagccaacaaggaaatcctcgatgaagcctacgtgatggccagcgtggacaacccccacgtgtgccgcctgctgggcatctgcctcacctccaccgtgcagctcatcacgcagctcatgcccttcggctgcctcctggactatgtccgggaacacaaagacaatattggctcccagtacctgctcaactggtgtgtgcagatcgcaaagggcatgaactacttggaggaccgtcgcttggtgcaccgcgacctggcagccaggaacgtactggtgaaaacaccgcagcatgtcaagatcacagattttgggctggccaaactgctgggtgcggaagagaaagaataccatgcagaaggaggcaaagtgcctatcaagtggatggcattggaatcaattttacacagaatctatacccaccagagtgatgtctggagctacggggtgactgtttgggagttgatgacctttggatccaagccatatgacggaatccctgccagcgagatctcctccatcctggagaaaggagaacgcctccctcagccacccatatgtaccatcgatgtctacatgatcatggtcaagtgctggatgatagacgcagatagtcgcccaaagttccgtgagttgatcatcgaattctccaaaatggcccgagacccccagcgctaccttgtcattcagggggatgaaagaatgcatttgccaagtcctacagactccaacttctaccgtgccctgatggatgaagaagacatggacgacgtggtggatgccgacgagtacctcatcccacagcagggcttcttcagcagcccctccacgtcacggactcccctcctgagctctctgagtgcaaccagcaacaattccaccgtggcttgcattgatagaaatgggctgcaaagctgtcccatcaaggaagacagcttcttgcagcgatacagctcagaccccacaggcgccttgactgaggacagcatagacgacaccttcctcccagtgcctgaatacataaaccagtccgttcccaaaaggcccgctggctctgtgcagaatcctgtctatcacaatcagcctctgaaccccgcgcccagcagagacccacactaccaggacccccacagcactgcagtgggcaaccccgagtatctcaacactgtccagcccacctgtgtcaacagcacattcgacagccctgcccactgggcccagaaaggcagccaccaaattagcctggacaaccctgactaccagcaggacttctttcccaaggaagccaagccaaatggcatctttaagggctccacagctgaaaatgcagaatacctaagggtcgcgccacaaagcagtgaatttattggagca

SEQ ID NO: 8357 - DNA, 1944 bp, synthetic construct
  source 1..1944: mol_type = other DNA; note = Description of Artificial Sequence: Synthetic polynucleotide
atgaataacctaaatgatcccccaaattggaatatccggcctaattccagggcggatggtggtgatggaagcaggtggaattatgccctgttggttccaatgctgggattggctgcttttcgggttggctgtgttccggccgcagagcaccgtctgcgtgaggagatcctggccaagttcctgcactggctgatgagtgtgtacgtcgtcgagctgctcaggtctttcttttatgtcacggagaccacgtttcaaaagaacaggctctttttctaccggaagagtgtctggagcaagttgcaaagcattggaatcagacagcacttgaagagggtgcagctgcgggagctgtcggaagcagaggtcaggcagcatcgggaagccaggcccgccctgctgacgtccagactccgcttcatccccaagcctgacgggctgcggccgattgtgaacatggactacgtcgtgggagccagaacgttccgcagagaaaagagggccgagcgtctcacctcgagggtgaaggcactgttcagcgtgctcaactacgagcgggcgcggcgccccggcctcctgggcgcctctgtgctgggcctggacgatatccacagggcctggcgcaccttcgtgctgcgtgtgcgggcccaggacccgccgcctgagctgtactttgtcaaggtggatgtgacgggcgcgtacgacaccatcccccaggacaggctcacggaggtcatcgccagcatcatcaaaccccagaacacgtactgcgtgcgtcggtatgccgtggtccagaaggccgcccatgggcacgtccgcaaggccttcaagagccacgtctctaccttgacagacctccagccgtacatgcgacagttcgtggctcacctgcaggagaccagcccgctgagggatgccgtcgtcatcgagcagagctcctccctgaatgaggccagcagtggcctcttcgacgtcttcctacgcttcatgtgccaccacgccgtgcgcatcaggggcaagtcctacgtccagtgccaggggatcccgcagggctccatcctctccacgctgctctgcagcctgtgctacggcgacatggagaacaagctgtttgcggggattcggcgggacgggctgctcctgcgtttggtggatgatttcttgttggtgacacctcacctcacccacgcgaaaaccttcctcaggaccctggtccgaggtgtccctgagtatggctgcgtggtgaacttgcggaagacagtggtgaacttccctgtagaagacgaggccctgggtggcacggcttttgttcagatgccggcccacggcctattcccctggtgcggcctgctgctggatacccggaccctggaggtgcagagcgactactccagctatgcccggacctccatcagagccagtctcaccttcaaccgcggcttcaaggctgggaggaacatgcgtcgcaaactctttggggtcttgcggctgaagtgtcacagcctgtttctggatttgcaggtgaacagcctccagacggtgtgcaccaacatctacaagatcctcctgctgcaggcgtacaggtttcacgcatgtgtgctgcagctcccatttcatcagcaagtttggaagaaccccacatttttcctgcgcgtcatctctgacacggcctccctctgctactccatcctgaaagccaagaacgcagggatgtcgctgggggccaagggcgccgccggccctctgccctccgaggccgtgcagtggctgtgccaccaagcattcctgctcaagctgactcgacaccgtgtcacctacgtgccactcctggggtcactcaggacagcccagacgcagctgagtcggaagctcccggggacgacgctgactgccctggaggccgcagccaacccggcactgccctcagacttcaagaccatcctggac

SEQ ID NO: 8358 - DNA, 5814 bp, synthetic construct
  source 1..5814: mol_type = other DNA; note = Description of Artificial Sequence: Synthetic polynucleotide
atgcttggaaccggacctgccgccgccaccaccgctgccaccacatctagcaatgtgagcgtcctgcagcagtttgccagtggcctaaagagccggaatgaggaaaccagggccaaagccgccaaggagctccagcactatgtcaccatggaactccgagagatgagtcaagaggagtctactcgcttctatgaccaactgaaccatcacatttttgaattggtttccagctcagatgccaatgagaggaaaggtggcatcttggccatagctagcctcataggagtggaaggtgggaatgccacccgaattggcagatttgccaactatcttcggaacctcctcccctccaatgacccagttgtcatggaaatggcatccaaggccattggccgtcttgccatggcaggggacacttttaccgctgagtacgtggaatttgaggtgaagcgagccctggaatggctgggtgctgaccgcaatgagggccggagacatgcagctgtcctggttctccgtgagctggccatcagcgtccctaccttcttcttccagcaagtgcaacccttctttgacaacatttttgtggccgtgtgggaccccaaacaggccatccgtgagggagctgtagccgcccttcgtgcctgtctgattctcacaacccagcgtgagccgaaggagatgcagaagcctcagtggtacaggcacacatttgaagaagcagagaagggatttgatgagaccttggccaaagagaagggcatgaatcgggatgatcggatccatggagccttgttgatccttaacgagctggtccgaatcagcagcatggagggagagagcgtttcccaaagtgtattctgcggaactagcacctactgtgttctcaacaccgtgccacctatagaagatgatcatgggaacagcaatagtagtcatgtaaaaatctttttaccgaaaaagctgcttgaatgtctgccgaaatgttcaagtttaccaaaagagaggcaccgctggaacactaatgaggaaattgcagcttatttaataacatttgagaaacacgaagaatggctaaccacctcccctaagacaagaccacagaatggctcaatgatactctacaacaggaagaaagtgaaatacaggaaagatgggtattgctggaaaaagaggaaagatgggaaaacgaccagagaggaccacatgaaactcaaggtccagggagtggagtgcttgtacggctgctatgtccattcctccatcatccccaccttccaccggaggtgctactggctccttcagaaccccgacatcgtcctggtgcactacctgaacgtgccggccatcgaggactgcggcaagccttgcggccccatcctctgctccatcaacaccgacaagaaggagtgggcgaaatggacgaaagaagagctcatcgggcagctgaaacccatgttccatggcatcaagtggacctgcagcaatgggaacagcagctcaggcttctcggtggaacagctggtgcagcagatcctcgacagccaccagaccaagccccagccgcggacccacaactgcctctgcaccggcagcctgggagctggcggcagcgtgcatcacaagtgtaacagcgccaaacaccgcatcatctcgcccaaggtggagccacggacaggggggtacgggagccactcggaggtgcagcacaatgacgtgtcggagggcaagcacgagcacagccacagcaagggctccagccgtgagaagaggaacggcaaggtggccaagcccgtgctcctgcaccagagcagcaccgaggtctcctccaccaaccaggtggaagtccccgacaccacccagagctcccctgtgtccatcagcagcgggctcaacagcgacccggacatggtggacagcccggtggtcacaggtgtgtccggtatggcggtggcctctgtgatggggagcttgtcccagagcgccacggtgttcatgtcagaggtcaccaatgaggccgtgtacaccatgtcccccaccgctggccccaaccaccacctcctctcacctgacgcctctcagggcctcgtcctggccgtgagctctgatggccacaagttcgcctttcccaccacgggcagctcggagagcctgtccatgctgcccaccaacgtgtccgaagagctggtcctctccaccaccctcgacggtggccggaagattccagaaaccaccatgaactttgaccccgactgtttccttaataacccaaagcagggccagacgtacgggggtggaggcctgaaagccgagatggtcagctccaacatccggcactcgccacccggggagcggagcttcagctttaccaccgtcctcaccaaggagatcaagaccgaggacacctccttcgagcagcagatggccaaagaagcgtactcctcctccgcggcggctgtggcagccagctccctcaccctgaccgccggctccagcctcctgccgtcgggcggcggcctgagtcccagcaccaccctggagcagatggacttcagcgccatcgactccaacaaggactacacgtccagcttcagccagacgggccacagcccccacatccaccagaccccctccccgagcttcttcctgcaggacgccagcaaacccctccccgtcgagcagaacacccacagcagcctgagtgactctgggggcaccttcgtgatgcccacggtgaaaacggaggcctcgtcccaaaccagctcctgcagcggtcacgtggagacgcggatcgagtccacttcctccctccacctcatgcagttccaggccaacttccaggccatgacggcagaaggggaggtcaccatggagacctcgcaggcggcggaagggagcgaggtcctgctcaagtctggggagctgcaggcttgcagctctgagcactacctgcagccggagaccaacggggtaatccgaagcgccggcggcgtccccatcctcccgggcaacgtggtgcagggactctaccccgtggcccagcccagcctcggcaacgcctccaacatggagctcagcctggaccactttgacatctccttcagcaaccagttctccgacctgatcaacgacttcatctccgtggaggggggcagcagcaccatctatgggcaccagctggtgtcgggggacagcacggcgctctcacagtcagaggacggggcgcgggcccccttcacccaggcagagatgtgcctcccctgctgtagcccccagcagggtagcctgcagctgagcagctcggagggcggggccagcaccatggcctacatgcacgtcgccgaggtggtctcggccgcctcggcccagggcaccctaggcatgctgcagcagagcggacgggtgttcatggtgaccgactactccccagagtggtcttacccagagggaggagtgaaggtcctcatcacaggcccgtggcaagaagccagcaataactacagctgcctgtttgaccagatctcagtgcctgcatccctgattcagcctggggtgctgcgctgctactgcccagcccatgacactggtcttgtgaccctacaagttgccttcaacaaccagatcatctccaactcggtggtgtttgagtacaaagcccgggctctgcccacgctcccttcctcccagcacgactggctgtcgttggacgataaccagttcaggatgtccatcctggaacgactggagcagatggagaggaggatggccgagatgacggggtcccagcagcacaaacaggcgagcggaggcggcagcagtggaggcggcagcgggagcgggaatggagggagccaggcacagtgtgcttctgggactggggccttggggagctgctttgagagccgtgtggtcgtggtatgcgagaagatgatgagccgagcctgctgggcgaagtccaagcacttgatccactcaaagactttccgcggaatgaccctactccacctggccgctgcccagggctatgccaccctaatccagaccctcatcaaatggcgtacaaagcacgcggatagcattgacctggaactggaagttgaccccttgaatgtggaccacttctcctgtactcctctgatgtgggcgtgtgccctagggcacttggaagctgccgtcgtgctgtacaagtgggaccgtcgggccatctcgattcccgactctctaggaaggctgcctttgggaattgccaggtcacggggtcatgtgaaattagcagagtgtctggagcacctgcagagagatgagcaggctcagctgggacagaaccccagaatccactgtcctgcaagcgaagagcccagcacagagagctggatggcccagtggcacagcgaagccatcagctctccagaaatacccaagggagtcactgttattgcaagcaccaacccagagctgagaagacctcgttctgaaccctctaattactacagcagtgagagccacaaagattatccggctcccaaaaagcataaattgaaccctgagtacttccagacaaggcaggagaagctgcttcccactgcactgagtctggaagagccaaatatcaggaagcaaagccctagttctaagcagtctgtccccgagacactcagccccagtgaaggagtgagggacttcagccgggaactctcccctcccactccagagactgcagcatttcaagcctctggatctcagcctgtaggaaagtggaattccaaagatctttacattggtgtgtctacagtacaggtgactggaaatccgaaggggaccagtgtaggaaaggaggcagcaccttcacaggtgcgtccacgggaaccaatgagtgtcctgatgatggctaacagagaggtggtgaatacagagctggggtcctaccgtgatagtgcagaaaatgaagaatgcggccagcccatggatgacatacaggtgaacatgatgaccttggcagaacacattattgaagccacacctgaccgaatcaagcaggagaattttgtgcccatggagtcctcaggattggaaagaacagaccctgccaccattagcagtacaatgagctggctggccagttatctagcggatgctgactgccttcccagtgctgcccagatccgaagtgcatataacgagcctctaaccccttcttctaataccagcttgagccctgttggctctcccgtcagtgaaatcgctttcgagaaacctaaccttccctccgccgcggattggtcagaattcctgagtgcatctaccagtgagaaggtagagaatgagtttgctcagctcactctgtctgatcatgaacagagagaactctatgaggctgccaggcttgtccagacagctttccggaaatacaagggccgacccttgcgggaacagcaagaagtagctgctgctgttattcagcgttgttacagaaaatataaacagtacgcactttataaaaagatgacacaggctgccatccttatccagagcaaattccgaagttactatgaacaaaaaaaattccagcagagccgacgggctgctgtgctcatccaaaagtactaccgaagttataagaaatgtggcaaaagacggcaggctcgccggacggctgtgattgtacaacagaaactcaggagcagtttgctaaccaaaaagcaggatcaagctgctcgaaaaataatgaggtttcttcgccgctgtcgccacagccccctggtggaccataggctgtacaaaaggagtgaaagaattgaaaaaggccaaggaact

SEQ ID NO: 8359 - DNA, 216 bp, synthetic construct
  source 1..216: mol_type = other DNA; note = Description of Artificial Sequence: Synthetic polynucleotide
atggcccggggctacggggccacggtcagcctagtcctgctgggtctggggctggcgctggctgtcattgtgctggctgtggtcctctctcgacaccaggccccatgtggcccccaggcctttgcccacgctgctgttgccgccgactccaaggtctgctcggatattggacggcaggaaactgcatatcttctggtttacatgaagatggagtgc

SEQ ID NO: 8360 - DNA, 939 bp, synthetic construct
  source 1..939: mol_type = other DNA; note = Description of Artificial Sequence: Synthetic polynucleotide
atgtttgtgtatgtgctcactcccggagagcaatcagggagacggctccccggccagacttggctgatgttttcttgtttctgtttcagccttcaggataattccttcagcagcaccactgtaacagagtgtgacgaagatccagtctctctacatgaagaccagactgattgctccagtctcagagatgaaaacaataaagagaactaccccgacgcaggggctctggtagaagagcacgcgccgccctcttgggagccgcagcagcagaatgtagaggcgaccgtgctggtggacagcgtattgcgacccagcatgggcaacttcaagtccaggaagcccaagtccatcttcaaagcggagagcgggaggagccacggagaaagtcaggagacagagcatgtggtatccagccagtcagagtgtcaggtgagagcaggaacaccagctcatgagagtccacaaaacaatgccttcaagtgccaagaaacagtgcgacttcaaccaaggagccgcaaagacagcctggaaagtgacagctccacggccatcattccccatgagctgattcgcacgcggcagcttgagagcgtacatctgaaattcaaccaggagtccggagccctcattcctctctgcctaaggggcaggctcctgcatggacggcactttacatataaaagtatcacaggtgacatggccatcacgtttgtctccacgggagtggaaggcgcctttgccactgaggagcatccttacgcggctcatggaccctggttacaaattctgttgaccgaagagtttgtagagaaaatgttggaggatttagaagatttgacttctccagaggaattcaaacttcccaaagagtacagctggcctgaaaagaagctgaaggtctccatcctgcctgacgtggtgttcgacagtccgctacac

SEQ ID NO: 8361 - DNA, 8478 bp, synthetic construct
  source 1..8478: mol_type = other DNA; note = Description of Artificial Sequence: Synthetic polynucleotide
atgcactcagccgggactcccgggttatcctcgcgccggacaggcaactccaccagctttcaaccaggaccgccaccgccgccccggctgctgctgctgctgctgcttctcctgtcactggtaagccgcgtcccggcacagcccgctgccttcggcagggcgttgctgtcccctggtctcgcgggggctgcaggggtccctgctgaggaggccatagtgctggcgaaccgcggactccgggtgcctttcggccgtgaagtctggctggatcccctgcatgacctggtgttgcaggtgcagcccggggaccgctgcgcggtttcggtactagacaacgacgcactggcccagcgaccgggccgcctgagtcccaagcgcttcccgtgcgactttggccctggcgaggtgcgctactctcacctgggcgcgcgcagcccgtctcgggaccgcgtccggctgcagctgcgctatgacgcgcccggaggggcagtagtgctaccactggtactggaggtggaggtggtcttcacccagctggaggttgtgactcggaacttgcctctggtcgtggaagagctgctggggaccagcaatgccctggacgcgcggagcctggagttcgccttccagcccgagacagaggagtgccgcgtgggcatcctgtccggcttgggcgcgctgcctcgctatggagaactcctccactacccgcaggtccctggaggagccagagagggaggcgccccggagactctcctgatggactgcaaagctttccaggaactaggcgtgcgctatcgccacacagccgccagtcgctcaccaaacagggactggatacccatggtggtggagctgcgttcacgaggggctcctgtgggcagccctgctttgaaacgcgagcacttccaggttctggtgaggatccgaggaggggccgagaacactgcacccaagcccagtttcgtggccatgatgatgatggaggtggaccagtttgtactgacggccctgaccccagacatgctggcagccgaggatgctgagtctccctctgacctgttgatcttcaaccttacttctccattccagcctggccagggctacttggtgagcaccgatgatcgcagcctgcccctttcctccttcactcagagggatctgcggctcctgaagattgcctaccagcccccttctgaagactctgaccaggagcgcctctttgaactggaattggaggtagtggatctagaaggagcagcttcagacccttttgccttcatggtagtggtgaagcccatgaacacaatggctccggtggtcacccggaataccggtcttattctctatgagggtcagtctcggcccctcacaggccctgcaggcagtggtccgcaaaacttggtcatcagcgatgaggatgacctagaagcagtgcggctagaggtggtggctgggctccggcatggtcaccttgtcattctgggtgcttccagtggcagctctgctcccaagagctttacagtggctgagctggcagccggccaggtggtctaccagcatgatgacagagacggctcgctgagcgacaacctggtgcttcgcatggtggatggaggaggcaggcaccaggtacagtttctgttccccatcaccttagtgcctgtggatgaccagccacctgttctcaatgccaacacggggctgacactggcagagggtgaaacagtgcccatcctgcccctttccctgagtgcaactgacatggattcagatgattctctgctgctttttgtgctggagtcacccttcttaactacggggcatctgcttctccgccaaactcaccctccccatgagaagcaggaacttctcagaggcctttggaggaaggagggggcattttatgagcgaacagtgacagagtggcagcagcaggacataacagagggcaggctgttctatagacactctgggccccatagtcctgggccagtcacagaccagttcacatttagagtccaggataaccatgaccctcctaatcagtccgggctacagcggtttgtgattcgtatccatcctgtggatcgcctccctccggagctgggcagtggctgtccccttcgtatggtggtacaggaatcccagctcacaccactgaggaagaagtggctgcgctacactgacctggacacagatgaccgagaactacgttacacagtgactcagtcccccacagacacagacgaaaatcacctgccagccccactgggtaccttggtcttgactgacaacccctcagtcgtggtgacccattttacccaagcccagatcaaccatcataaaattgcttacagacccccgggtcaagaactgggcgtggctactcgagtggcccagttccagttccaggtggaagaccgagctgggaatgtggctccaggtacctttaccctttacttgcatcccgtggacaaccagccacctgagatcctcaacaccggcttcactattcaggagaagggtcaccacatcctgagtgagacagagttgcacgtgaatgatgtagacactgatgttgcccatatctctttcactctcactcaggcacccaaacatggccacatgagagtgtctggacagatcctgcatgtagggggtctcttccacttggaggacataaaacagggccgagtttcctatgcccataatggggacaagtccctgactgatagctgctccttggaagtcagtgacagacatcatgtggtgcccatcactctcagagtaaatgtccggccagtggatgatgaagtgcccatactgagccatcctactggcactctggagtcctatctagatgtcttagaaaatggggctactgaaatcactgccaatgttattaaggggaccaatgaggaaactgatgacttgatgttgactttcctcttggaagatccacctttgtatggggaaatcttggtcaatggcattccagcagagcagtttactcaaagggacatcttggagggctctgttgtatatacccacaccagtggtgagataggcctattgcctaaagcggattcttttaacctgagtctgtcagatatgtctcaagaatggagaattggtggcaatactatccaaggagttactatatgggtgaccatcctgcctgttgatagccaggccccagaaatctttgtaggtgaacagttgatagtaatggaaggtgataaaagtgttataacatcagtgcatataagtgctgaagatgtcgactccctgaatgatgacatcttgtgcactatagttattcagcctacttcaggttatgttgaaaacatttctccagcaccaggctctgagaaatcaagagcagggattgccataagtgctttcaacttgaaagatctcaggcagggccacataaactatgtccagagtgtccataaaggggtggaacctgtggaggaccgatttgtatttcgttgttctgatggcattaacttttcagagagacagttcttccccattgtaatcattcccaccaatgatgaacagccagagatgtttatgagagaatttatggtgatggaaggcatgagtctggtaattgatacacccattctcaatgctgctgatgctgatgttcccctggatgatttaactttcactattacccaattccccactcatggtcacatcatgaatcagctgataaatggcacggttttggtcgaaagcttcaccttggatcagatcatagagagttccagcattatttatgagcatgatgactccgagacccaggaagacagttttgtgattaaactaacagatgggaagcactctgtggaaaagacggtcctcattatagttatccctgttgatgatgagacgcccagaatgactatcaataatggactagaaatagaaattggggataccaagattatcaacaacaaaatattaatggcaacagatttagattcagaagacaaatctttggtttatattattcgttatgggccaggacatggcttattacagagacgaaaacctactggtgcctttgaaaatatcacactgggcatgaattttacccaggatgaagtagacagaaacttaattcagtatgtccatttggggcaagagggcattcgggacctaattaaatttgatgtgactgatggaataaatcccctcatagatcgttacttttatgtgtccatcgggagcattgacattgtcttccctgatgtgataagtaagggagtgtccttgaaagaaggtggcaaagtcactcttacaacagacctactaagcactagtgacttgaacagtcctgatgaaaacttggtttttaccatcaccagggctcccatgcgaggtcacctggaatgcacggatcagcctggtgtgtccatcacgtctttcactcagctgcaactggctggaaacaaaatctactacatccacacagctgatgatgaagtgaaaatggacagttttgagtttcaagtcaccgatggacgtaaccctgtctttcggacattccgtatctccattagcgatgtggacaataaaaagccagtggtcaccatccacaagctggttgtcagtgaaagtgaaaacaagctgattactccttttgagctcactgtcgaagacagagatactcctgacaagctcctgaaattcactatcacccaggtgcctattcatggccatctcctattcaacaataccagacctgtcatggtttttaccaagcaagacttgaatgaaaacttaatcagctacaaacatgatggcactgagtcaagtgaagatagcttctccttcacagtgactgatggcacccatacagacttctatgtttttcctgatacggtgtttgaaacaaggagaccccaagtgatgaagatccaggtcttggctgttgacaacagtgtcccccaaatcgcagtgaataagggggcctctacacttcgcactctagccactggccacttggggttcatgatcacaagcaaaatattgaaagtggaggacagagacagcttacacatttctcttagatttatcgtgacagaggcccctcaacatggatatcttctcaacctggacaaaggcaaccacagcatcactcagttcacacaagctgacattgatgacatgaaaatatgctatgtcttaagagaaggggctaatgccacaagtgatatgttctattttgcagttgaagatggtggtggaaacaagttaacgtaccagaattttcgtctgaattgggcatggatctcctttgaaaaggaatattacctggtcaatgaggactccaaatttctagatgttgttcttaaacgtagaggttacttgggagaaacttcttttataagtattggcacaagagacagaactgcagaaaaagacaaagacttcaagggcaaagcacagaaacaagtgcagttcaacccaggccagaccagggccacatggcgagtgcggatcctgagtgatggggagcatgagcagtctgaaacctttcaggtggtactctcagagcccgtgctggctgccttggaattccccacagtcgccactgttgagatcgttgatccaggagatgagccaactgtgtttattccccagtccaaatactccgttgaagaagatgttggtgagctgttcattcccatcaggaggagcggagatgtgagccaggagttgatggtggtctgttatacccaacaaggaacagcaactggaactgtgccgacttccgtgttgtcttactctgattacatatccaggcctgaggaccacaccagtgttgtccgctttgacaaagatgaacgggagaaactgtgtcggatagtcataattgatgactctttgtacgaggaggaggaaaccttccatgtccttctgagcatgcccatggggggaagaatcggatcagagttcccaggggctcaagttacaatcgttcctgacaaagatgatgaacccatcttttacttcggtgatgtggaatactctgtggatgagagtgctggctatgtggaagtgcaggtgtggagaacgggcactgacctgtccaagtcttctagtgtcacagtgaggtctcggaaaacagatcctccctctgcagatgctggaacagactatgtgggcatcagccgtaatttagattttgcacctggagtcaacatgcagcctgttcgtgttgtcattctggatgaccttggacaaccagcgctggagggaattgagaaatttgaactggtgcttcgcatgcctatgaacgcagcccttggcgagcccagcaaagccacagtgtccataaatgactctgtctccgatttgcctaagatgcaattcaaagaacgaatatatactggcagcgaaagtgatgggcagatagttacaatgatccataggactggggatgtccagtacagatcttcagtgagatgctacacccggcaggggtctgcacaggtgatgatggactttgaagaacgcccaaacactgatacctccatcatcacattcctccctggtgagacagaaaagccctgcattcttgagctgatggacgatgtgctctatgaggaggtagaggagctccgcctggtactcggcactccacaaagcaactctccctttggggctgcagttggtgaacaaaatgaaactctcataaggatccgagatgatgctgataagactgttattaaatttggagaaaccaaatttagtgtcactgaacccaaagaacctggagagtcggtggttataagaattccagtgattcgccaaggagacacttcaaaggtttccattgtgagagtccacaccaaggatggctcggccacctctggagaagactaccaccctgtgtcagaagaaattgagtttaaggaaggggaaacccagcacgtggttgaaatcgaagttacctttgacggggtgagagagatgagagaggccttcactgttcacctaaaacctgatgaaaatatgatagcagagatgcagttgacgaaagccattgtgtacatagaagaaatgagcagcatggcagatgtcacttttccttctgtccctcaaattgtatccctgttgatgtatgacgacacttccaaagctaaggagagtgctgaacccatgtctggctatcctgtcatctgtatcacagcttgcaaccccaaatattcagactacgataaaacaggctctatctgtgcaagtgagaacatcaatgacactttgacgcggtaccggtggctgattagtgcacctgcgggccctgacggtgtgaccagccctatgagagaagtggacttcgacaccttttttacgtcatccaagatggtcacactggactccatatactttcagcctggctcccgggtacagtgcgcagctcgtgctgtgaacaccaatggggatgaaggcctggagctcatgagccctattgtaaccatcagcagagaagaaggtctttgtcagccccgtgtacctggggttgttggagcagagccgttctcagctaaattgcgctacacaggccctgaggatgcagactacacaaaccttatcaagctcactgtcacaatgccacacatagatggcatgctccccgtgatctccactagagagctttccaactttgagctcaccctcagccctgatggcacaagagttggaaaccacaagtgctccaacctcctggattatactgaagtgaagactcattatggtttcttgactgatgctaccaaaaatccagaaataattggagagacatatccttaccagtacagcttgtccatcagaggttccactaccttgcgcttctaccggaacctgaacctagaggcctgtttatgggagttcgttagctactatgacatgtcagaactccttgctgactgtggtggcaccattggaacagatggacaggtggatgtgaaattggaccccaaggatttgcgaatagatacatttcgagccaaaggagcaggagggcagcatgttaataaaactgatagtgccgtcagacttgtccacatccccacagggctagtagtagaatgccaacaagaaagatcacagataaaaaataaagaaatagcctttcgtgtgttgagagctagactctaccagcagattattgagaaagacaagcgtcagcaacaaagtgctagaaaactgcaggtgggaacaagagcccagtcagagcgaattcggacatataatttcacccaggatagagtcagtgaccacaggatagcatatgaagttcgtgatattaaggctcagtctcattccacgggtggtagtcgtgaccctgcacattccacattcctatccttggattctgtgagatcacctggtattctcattatgacttcttctgttaggaatttttatgtggtgggaagggcctggatcagc

SEQ ID NO: 8362 - DNA, 1635 bp, synthetic construct
  source 1..1635: mol_type = other DNA; note = Description of Artificial Sequence: Synthetic polynucleotide
atggccatagaccggcggcgcgaggcggcgggcggcgggcctgggcggcagccggccccggccgaggagaacggctccctgccgcccggggacgcggcggcctcggcgcccctcgggggacgcgcgggccccggcggcggcgcggagatccagccgctgcccccactgcatcctggaggcggcccgcacccgagctgctgctccgcggctgcggccccgagcctcttgttgctggactatgacgggtcggtgctgcccttcctcgggggcctgggcgggggctatcagaagaccctcgtgctgctcacctggatcccggcgctgttcatcggcttcagccagttctcggactcgttcctcctggaccagcccaacttctggtgccgcggggccggcaaaggcaccgagctggcaggggtcaccaccacaggccggggcggggacatgggcaactggaccagcctccccaccacccccttcgccactgccccctgggaggctgcgggcaaccggagcaacagcagcggcgcggacggaggcgacacaccacccctgccatcccctccggacaagggggacaacgcctccaactgtgactgccgcgcatgggactacggcatccgcgccggcctcgtccagaacgtggtcagcaagtgggatcttgtgtgtgataatgcctggaaggtccatatcgctaagttctccttactggttggattaatctttggctacctaataactggatgcattgctgactgggtcggccggcggcctgtgctgctgttttccatcatcttcattctgatctttggactgactgtggcactgtcagtgaatgtgacaatgttcagcacactcaggttctttgaaggattttgcctggctggaatcattctcaccttgtatgctttacgtatcgatatcctgaagcttgtagcagcccaagtgggaagccagtggaaagatatctatcagtttctttgcaatgccagtgagagggaggttgctgctttctccaatgggtacacagccgaccacgagcgggcctacgcagctctgcagcactggaccatccggggccccgaggccagcctcgcccagctaattagcgccctgcgccagcaccggagaaacgatgttgtggagaagattcgtgggctgatggaagacaccacccagctggaaactgacaaactagctctcccgatgagccccagcccgcttagcccgagccccatccccagccccaacgcgaaacttgagaattccgctctcctgacggtggagccttccccacaggacaagaacaagggcttcttcgtggatgagtcggagccccttctccgctgtgactctacatccagcggctcctccgcgctgagcaggaacggttcctttattaccaaagaaaagaaggacacagtgttgcggcaggtacgcctggacccctgtgacttgcagcctatctttgatgacatgctccactttctaaatcctgaggagctgcgggtgattgaagagattccccaggctgaggacaaactagaccggctattcgaaattattggagtcaagagccaggaagccagccagaccctcctggactctgtttatagccatcttcctgacctgctg

SEQ ID NO: 8363 - DNA, 1290 bp, synthetic construct
  source 1..1290: mol_type = other DNA; note = Description of Artificial Sequence: Synthetic polynucleotide
atggaaaacactgatcgaaaagtatcctccttgcacacctcccgagttcagaggcagatggtggtctccgttcacgacttacccgagaagagctttgtgcccctgctggacagcaaatacgtcctctgtgtgtgggatatttggcagccttcagggccacagaaagttctgatatgtgagtcccaggtcacgtgttgctgcttgagccctttgaaagcatttttactgtttgccggaacagcgcacggctcagttgtcgtctgggatttgagagaagactcaaggctgcattactctgtgacgctgagcgatggcttctggacgttccggaccgccacgttttccaccgatggaatccttacctcagtaaaccaccgaagccctcttcaagcagtagaacctatctcaacgtccgtccacaaaaagcagagctttgtgctttcacccttttctactcaagaagaaatgtcaggtttgtccttccacatcgcttccttggatgagagtggggttctcaatgtatgggtggttgttgaattaccaaaggcagacatcgcaggttcaataagtgatttaggtctgatgcctggagggagggtcaagctggtacatagtgctctgatccagttgggtgacagtctttcccataaaggtaatgaattttggggcactacacaaacactgaatgttaaatttctgccttcagatcctaatcactttattattggcacagacatgggtctcataagccatggcacaagacaagatttgagagtggctcccaaactattcaaacctcagcaacatggtataagaccagtgaaagttaatgtcattgatttttcaccatttggagaaccaatatttttggccggctgttcggacggaagcatcaggctgcaccagctgagctccgcgtttccgctcctgcagtgggacagcagcacggacagccatgcggtcaccggcctgcagtggtccccaaccaggcctgccgtgttcctggtgcaggacgacacatccaacatctacatctgggacctcctccagagcgatctgggtcctgtcgccaaacagcaggtctcccccaacaggctggtggccatggctgcggtgggtgagcctgagaaggctggtggcagcttcctggccctggtgctggccagggcgtctggctccatcgacatccagcacctgaagaggcggtgggcggccccggaggtggacgagtgcaacaggctgcgtctgcttttgcaggaagccctgtggccagagggaaaactgcacaag

SEQ ID NO: 8364 - DNA, 1326 bp, synthetic construct
  source 1..1326: mol_type = other DNA; note = Description of Artificial Sequence: Synthetic polynucleotide
atgacatgccctcgcaatgtaactccgaactcgtacgcggagcccttggctgcgcccggcggaggagagcgctatagccggagcgcaggcatgtatatgcagtctgggagtgacttcaattgcggggtgatgaggggctgcgggctcgcgccctcgctctccaagagggacgagggcagcagccccagcctcgccctcaacacctatccgtcctacctctcgcagctggactcctggggcgaccccaaagccgcctatcgcctggaacaacctgttggcaggccgctgtcctcctgctcctacccacctagtgtcaaggaggagaatgtctgctgcatgtacagcgcagagaagcgggcgaaaagtggccccgaggcagctctctactcccaccccttgccggagtcctgccttggggagcacgaggtacccgtgcccagctactaccgcgccagcccgagctactccgcgctggacaagacgccccactgttctggggccaacgacttcgaagcccctttcgagcagcgggccagtctcaacccgcgcgccgaacatctggaatcgcctcagctggggggcaaagtgagtttccctgagacccccaagtccgacagccagacccccagccccaatgaaatcaagacggagcagagcctggcgggccctaaagggagcccctcggagagcgaaaaggagagggccaaagctgccgactccagcccagacacctcggataacgaagcgaaaggcaagtatatcgcgtcaacacagcgacctgacgggacctggcgcaagcagcggagggtgaaagaaggatatgtgccccaggaggaggtcccagtatatgaaaacaagtatgtgaagtttttcaagagtaaaccagagttgcccccagggctaagccctgaggccactgctcctgtcaccccatccaggcctgaaggtggtgaaccaggcctctccaagacagccaaacgtaacctgaagcgaaaggagaagaggcggcagcagcaagagaaaggagaggcagaggccttgagcaggactcttgataaggtgtccctggaagagacagcccaactccccagtgctccacagggctctcgggcagcccccacagctgcatctgaccagcctgactcagctgccaccactgagaaagccaagaagataaagaacctaaagaagaaactccggcaggtggaagagctgcagcagcggatccaggctggggaagtcagccagcctagcaaagagcagctagaaaagctagcaaggaggagggcgctagaagaggagttagaggacttggagttaggcctc

SEQ ID NO: 8365 - DNA, 2310 bp, synthetic construct
  source 1..2310: mol_type = other DNA; note = Description of Artificial Sequence: Synthetic polynucleotide
atggctgctgagaagcaggtcccaggcggcggcggcggcggcggcagtggcggcggcggtggcagtggcggcggcggtagcggcggtggacgtggtgccggaggggaagaaaataaagaaaacgaacgcccttcggccggatcgaaggcaaacaaagaatttggggatagcctgagtttggagattcttcagattattaaggaatcccagcagcagcatggtttacggcatggagattttcagaggtacaggggctactgttcccgtagacaaagacgtcttcgaaaaacactcaacttcaagatgggtaacagacacaaattcacagggaagaaagtgactgaagagcttctgaccgataatagatacttgcttctggttctgatggatgctgaaagagcctggagctacgccatgcagctgaaacaggaagccaacactgaaccccgaaaacggtttcacttgttatctcgcctacgcaaagccgtgaagcatgcagaggaattggaacgcttgtgtgagagcaatcgcgtggatgccaagaccaaattagaggctcaggcttacacagcttacctctcaggaatgctacgttttgaacatcaagaatggaaagctgccattgaggcttttaacaaatgcaaaactatctatgagaagctagccagtgctttcacagaggagcaggctgtgctgtataaccaacgtgtggaagagatttcacccaacatccgctattgtgcatataatattggggaccagtcagccatcaatgaactcatgcagatgagattgaggtctgggggcactgagggtctcttggctgaaaaattggaggctttgatcactcagactcgagccaaacaggcagctaccatgagtgaagtggagtggagagggagaacggttccagtgaagattgacaaagtgcgcattttcttattaggactggctgataacgaagcagctattgtccaggctgaaagcgaagaaactaaggagcgcctgtttgaatcaatgctcagcgagtgtcgggacgccatccaggtggttcgggaggagctcaagccagatcagccattgatcagccgcaactacaagggcgatgtggccatgagcaagattgagcacttcatgcctttgctggtacagcgggaggaggaaggcgccctggccccgctgctgagccacggccaggtccacttcctatggatcaaacacagcaacctctacttggtggccaccacatcgaagaatgccaatgcctccctggtgtactccttcctgtataagacaatagaggtattctgcgaatacttcaaggagctggaggaggagagcatccgggacaactttgtcatcgtctacgagttgctggacgagctcatggactttggcttcccgcagaccaccgacagcaagatcctgcaggagtacatcactcagcagagcaacaagctggagacgggcaagtcacgggtgccacccactgtcaccaacgctgtgtcctggcgctccgagggtatcaagtataagaagaacgaggtcttcattgatgtcatagagtctgtcaacctgctggtcaatgccaacggcagcgtccttctgagcgaaatcgtcggtaccatcaagctcaaggtgtttctgtcaggaatgccagagctgcggctgggcctcaatgaccgcgtgctcttcgagctcactggcctttcaggcagcaagaacaaatcagtagagctggaggatgtaaaattccaccagtgcgtgcggctctctcgctttgacaacgaccgcaccatctccttcatcccgcctgatggtgactttgagctcatgtcataccgcctcagcacccaggtcaagccactgatctggattgagtctgtcattgagaagttctcccacagccgcgtggagatcatggtcaaggccaaggggcagtttaagaaacagtcagtggccaacggtgtggagatatctgtgcctgtacccagcgatgccgactcccccagattcaagaccagtgtgggcagcgccaagtatgtgccggagagaaacgtcgtgatttggagtattaagtctttcccggggggcaaggagtacttgatgcgagcccactttggcctccccagtgtggaaaaggaagaggtggagggccggccccccatcggggtcaagtttgagatcccctacttcaccgtctctgggatccaggtccgatacatgaagatcattgagaaaagtggttaccaggccctgccctgggttcgctacatcacccagagtggcgattaccaacttcgtaccagc

SEQ ID NO: 8366 - DNA, 1386 bp, synthetic construct
  source 1..1386: mol_type = other DNA; note = Description of Artificial Sequence: Synthetic polynucleotide
atgtcgctgctgcggtcgctgcgcgtgtttctggtcgcgcggaccgggagctacccggctgggtctcttctgcgtcagtcgccccagccaaggcacacattttatgctgggccccgtctgtctgcctcggcctccagcaaggagctcctcatgaagctgcggcggaaaacaggctactcctttgtaaattgcaagaaagctctggagacttgtggcggggacctcaaacaggcagagatctggctccacaaggaggcccagaaggagggctggagcaaagctgccaagctccaagggaggaagaccaaagaaggcctgattgggctgttgcaggaaggaaacacaactgtattagtagaggtaaactgtgagacagattttgtttctagaaatttaaaatttcaactgttggtccagcaagtagcccttggaaccatgatgcattgtcagaccctaaaggatcaaccctctgcatacagtaaagtgcagtggctcacgcctgtaaacctagcactttgggaggctgaagcaggtggatcacttgagggtttcttgaattcctctgagctttctggacttccagctgggcctgacagagaaggctcactcaaggatcagttggctttagcaattgactccacttcagcctacagctccctgctcacttttcacctgtccactcctcggtcccaccacctgtaccatgcccgcctgtggctgcacgtgctccccacccttcctggcactctttgcttgaggatcttccgatggggaccaaggaggaggcgccaagggtcccgcactctcctggctgagcaccacatcaccaacctgggctggcataccttaactctgccctctagtggcttgaggggtgagaagtctggtgtcctgaaactgcaactagactgcagacccctagaaggcaacagcacagttactggacaaccgaggcggctcttggacacagcaggacaccagcagcccttcctagagcttaagatccgagccaatgagcctggagcaggccgggccaggaggaggacccccacctgtgagcctgcgacccccttatgttgcaggcgagaccattacgtagacttccaggaactgggatggcgggactggatactgcagcccgaggggtaccagctgaattactgcagtgggcagtgccctccccacctggctggcagcccaggcattgctgcctctttccattctgccgtcttcagcctcctcaaagccaacaatccttggcctgccagtacctcctgttgtgtccctactgcccgaaggcccctctctctcctctacctggatcataatggcaatgtggtcaagacggatgtgccagatatggtggtggaggcctgtggctgcagc

SEQ ID NO: 8367 - DNA, 2790 bp, synthetic construct
  source 1..2790: mol_type = other DNA; note = Description of Artificial Sequence: Synthetic polynucleotide
atggcttcactgagaagagtcaaagtgctgttggtgttgaacttgatcgcggtagccggcttcgtgctcttcctggccaagtgccggcccatcgcggtgcgcagcggagacgccttccacgagatccggccgcgcgccgaggtggccaacctcagcgcgcacagcgccagccccatccaggatgcggtcctgaagcgcctgtcgctgctggaggacatcgtgtaccggcagctgaatggcttatccaaatcccttgggctcattgaaggttatggtgggcggggtaaagggggccttccggctactctttccccggctgaagaagaaaaggctaagggaccccatgagaagtatggctacaattcatacctcagtgaaaaaatttcactggaccgttccattccggattatcgtcccaccaaatttgttattgggcgggaaaaaccaggacaagtgagcgaggttgcccagttgataagccagacactggaacaggagaggcgccagagagagctgctggaacagcactatgcccagtatgatgccgacgatgacgagaacactgtggctgaattgcaaggaatgtctggcaactgcaataacaataacaactattttcttaagacaggagaatatgccacagatgaagaagaagatgaggtaggacctgtccttcctggcagcgacatggccattgaagtctttgagctgcctgagaatgaggacatgttttccccatcagaactggacacaagcaagctcagtcacaagttcaaagagttgcaaatcaaacatgcagttacagaagcagagattcaaaaattgaagaccaagctgcaggcagcagaaaatgagaaagtgaggtgggaactagaaaaaacccaactccaacaaaacatagaagagaataaggaaagaatgttgaagttggaaagctactggattgaggcccaaacattatgccacacagtgaatgagcatctcaaagagactcaaagccagtatcaggccttggaaaagaaatacaacaaggcaaagaagttgatcaaggattttcaacaaaaagagcttgatttcatcaaaagacaggaagcagaaagaaagaaaatagaagatttggaaaaagctcatcttgtggaagtgcaaggcctccaagtgcggattagagatttggaagctgaggtattcaggctactgaagcaaaatgggactcaagttaacaataataacaacatctttgagagaagaacatctcttggtgaagtctctaaaggggataccatggagaacttggatggcaagcagacatcttgccaagatggcctaagtcaagacttgaatgaagcagtcccagagacagagcgcctggattcaaaagcactgaaaactcgagcccagctctctgtgaagaacagacgccagagaccctctaggacaagactgtatgatagtgttagttccacagatggggaggacagtctagagagaaagccatcaaacagtttctataaccacatgcatattaccaaattacttccacctaagggtttgagaacgtcttctccagaatcagattctggtgttccacccctcaccccggtggatagcaatgtgcccttctcgtctgaccacatagctgaatttcaagaagaaccactggacccagaaatggggcctctctcctctatgtggggagacacttcactgttttctacttcaaagtctgatcatgatgtggaagaatctccttgccatcaccaaaccaccaacaagaaaatattacgagaaaaagatgatgccaaagatcccaaatcactaagggcatccagttcattggcggtgcaaggaggaaaaattaagcggaagtttgtggatctgggggcgcctttgcgaaggaattccagcaagggaaagaagtggaaagaaaaagaaaaagaagccagtaggttttctgcaggtagcaggatcttcagaggcagactggaaaactggacacccaagccatgttcaacagctcagacctccactcgttccccttgcatgcctttctcatggtttaatgacagccggaaaggatcctattccttcaggaacctgcctgcgcctacaagttcccttcagccttctcctgagactctaatttcagataaaaaggggtccaaggtagaaaacacatggattacaaaagcaaacaagagaaacccaaatccctcctcttcttcaatctttggaaggcattctcaacttatgtctgtagtctggatccaagaaaccaataattttaccttcaatgatgacttcagtcccagcagtaccagttcagcagacctcagcggcttaggagcagaacctaaaacaccagggctctctcagtccttagcactgtcatcagatgagatccttgatgatggacagtctcccaaacacagtcagtgtcagaatcgggccgttcaggaatggagtgtgcagcaggtttctcactggttaatgagcctaaatctggagcagtatgtatctgaattcagtgcccaaaacatcactggagaacagctcctgcagttggatggaaataaacttaaggctcttggaatgacagcatcccaggaccgagcagtggtcaaaaagaaactcaaggaaatgaagatgtctctagagaaggctcggaaggcccaagagaaaatggaaaaacaaagagaaaagctaaggagaaaggagcaagagcaaatgcagaggaagtccaaaaagacagaaaagatgacgtcaactacagccgagggtgctggtgagcag

SEQ ID NO: 8368 - DNA, 2166 bp, synthetic construct
  source 1..2166: mol_type = other DNA; note = Description of Artificial Sequence: Synthetic polynucleotide
atgcagagcacgcaggcccatgagaacagcagggatagccggctggcatggatgggcacctgggagcaccttgtgtctactggattcaaccagatgcgtgagcgcgaagtgaagctgtgggacacgcggttcttctccagcgccctggcctccctcaccttggacacctcgcttgggtgtctcgtgcctctgctggaccctgactctgggctcctggtcctggcaggaaagggcgagaggcagctgtactgttacgaggtggtcccgcagcagccggcgctgagcccagtgacccagtgtgtcctggagagcgtgctgcgtggggctgcccttgtgccccggcaggcgctggccgtcatgagctgcgaggtactccgcgtcctacagctgagcgacacagccatcgtgcccatcggctaccatgtgccccgcaaggctgtggagttccacgaggacctgttcccggacactgccggctgtgtgcctgccaccgacccccatagctggtgggctggggacaaccagcaggtgcagaaggtcagcctcaaccccgcctgccggccccacccgagcttcacttcctgtctggtgccccctgcggagcccctccctgacacagcccagcctgcggtgatggagacacccgtgggtgatgcagacgcaagcgagggtttctcttcccctcccagttcgctgacctcgccctccacgccctccagcctggggccctcactctccagcaccagtggcatcgggaccagccccagtttgaggtcgctgcagagcctgctgggccccagttccaagttccgccatgctcagggcactgtcctgcaccgagacagccacatcaccaacctcaaggggctcaacctcaccacacctggtgagagtgacggcttctgtgccaacaagctgcgtgtggccgtgccgctgctcagcagcgggggacaggtggctgtgcttgagctacggaagcctggccgcctgcccgacacggcactgcccacgctgcagaatggggcagctgtgactgatctggcctgggacccctttgacccccatcgcctcgctgtggctggtgaggacgccaggatccgactgtggcgggtacccgcagagggcctggaagaggtgctcaccacgccagagactgtgctcacaggccacacggagaagatctgctccctgcgcttccacccactggcagccaatgtgctggcctcgtcctcctatgacctcactgttcgcatctgggaccttcaggctggagctgatcggctgaagctgcagggccaccaagaccagatcttcagcctggcctggagtcctgatgggcagcagctggccactgtctgcaaggatgggcgtgtgcgggtctacaggccccggagtggccctgagcccctgcaggaaggcccagggcccaagggaggacgcggagctcgcattgtctgggtatgtgatggtcgctgtctgctggtgtctggctttgacagccaaagtgagcgccagctgctcctatatgaagctgaggccctggccggcggacccttggcagtgttgggcctggacgtggctccctcaaccctgctgcccagctacgacccagacactggcctggtgctcctgaccggcaagggcgacacccgtgtattcctgtacgagctgctccccgagtcccctttcttcctggagtgcaacagcttcacgtcgcctgacccccacaagggcctcgtcctcctgcctaagacggagtgcgacgtgcgggaagtggagctgatgcggtgcctgcggctgcgtcagtcctccctggagcctgtggccttccggctgccccgagtccggaaagagttcttccaggatgacgtgttcccagacacggctgtgatctgggagcctgtgctcagtgccgaggcctggctgcaaggcgctaatgggcagccctggcttctcagcctgcagcctcctgacatgagcccagtgagccaagccccccgagaggcccctgctcgtcgggccccatcctcagcgcagtacctggaagaaaagtctgaccagcaaaagaaggaggagctgctgaatgccatggtggcaaaactggggaaccgggaggacccactcccccaggactcctttgaaggcgtggacgaggacgagtgggac

SEQ ID NO: 8369 - DNA, 309 bp, synthetic construct
  source 1..309: mol_type = other DNA; note = Description of Artificial Sequence: Synthetic polynucleotide
atgggcgagaccatgtcaaagaggctgaagctccacctgggaggggaggcagaaatggaggaacgggcgttcgtcaaccccttcccggactacgaggccgccgccggggcgctgctcgcctccggagcggccgaagagacaggctgtgttcgtcccccggcgaccacggatgagcccggcctcccttttcatcaggacgggaaggatgctttcattggatttggaggaaatgtgatcaggcaacaagtcaaggataacgccaaatggtatatcactgattttgtagagctgctgggagaactggaagaa

SEQ ID NO: 8370 - DNA, 1293 bp, synthetic construct
  source 1..1293: mol_type = other DNA; note = Description of Artificial Sequence: Synthetic polynucleotide
atgccgcagtccaagtcccggaagatcgcgatcctgggctaccggtctgtggcctccggcctctcctcctctccgtcaacacccacccaagtgaccaagcagcacacgtttcccctggaatcctataagcacgagcctgaacggttagagaatcgcatctatgcctcgtcttcccccccggacacagggcagaggttctgcccgtcttccttccagagcccgaccaggcctccactggcatcaccgacacactatgctccctccaaagccgcggcgctggcggcggccctgggacccgcggaagccggcatgctggagaagctggagttcgaggacgaagcagtagaagactcagaaagtggtgtttacatgcgattcatgaggtcacacaagtgttatgacatcgttccaaccagttcaaagcttgttgtctttgatactacattacaagttaaaaaggccttctttgctttggtagccaacggtgtccgagcagcgccactgtgggagagtaaaaaacaaagttttgtaggaatgctaacaattacagatttcataaatatactacatagatactataaatcacctatggtacagatttatgaattagaggaacataaaattgaaacatggagggagctttatttacaagaaacatttaagcctttagtgaatatatctccagatgcaagcctcttcgatgctgtatactccttgatcaaaaataaaatccacagattgcccgttattgaccctatcagtgggaatgcactttatatacttacccacaaaagaatcctcaagttcctccagctttttatgtctgatatgccaaagcctgccttcatgaagcagaacctggatgagcttggaataggaacgtaccacaacattgccttcatacatccagacactcccatcatcaaagccttgaacatatttgtggaaagacgaatatcagctctgcctgttgtggatgagtcaggaaaagttgtagatatttattccaaatttgatgtaattaatcttgctgctgagaaaacatacaataacctagatatcacggtgacccaggcccttcagcaccgttcacagtattttgaaggtgttgtgaagtgcaataagctggaaatactggagaccatcgtggacagaatagtaagagctgaggtccatcggctggtggtggtaaatgaagcagatagtattgtgggtattatttccctgtcggacattctgcaagccctgatcctcacaccagcaggtgccaaacaaaaggagacagaaacggag

SEQ ID NO: 8371 - DNA, 1188 bp, synthetic construct
  source 1..1188: mol_type = other DNA; note = Description of Artificial Sequence: Synthetic polynucleotide
atgggtgctgggccctccttgctgctcgccgccctcctgctgcttctctccggcgacggcgccgtgcgctgcgacacacctgccaactgcacctatcttgacctgctgggcacctgggtcttccaggtgggctccagcggttcccagcgcgatgtcaactgctcggttatgggaccacaagaaaaaaaagtagtggtgtaccttcagaagctggatacagcatatgatgaccttggcaattctggccatttcaccatcatttacaaccaaggctttgagattgtgttgaatgactacaagtggtttgccttttttaagtataaagaagagggcagcaaggtgaccacttactgcaacgagacaatgactgggtgggtgcatgatgtgttgggccggaactgggcttgtttcaccggaaagaaggtgggaactgcctctgagaatgtgtatgtcaacatagcacaccttaagaattctcaggaaaagtattctaataggctctacaagtatgatcacaactttgtgaaagctatcaatgccattcagaagtcttggactgcaactacatacatggaatatgagactcttaccctgggagatatgattaggagaagtggtggccacagtcgaaaaatcccaaggcccaaacctgcaccactgactgctgaaatacagcaaaagattttgcatttgccaacatcttgggactggagaaatgttcatggtatcaattttgtcagtcctgttcgaaaccaaggtcaagaaagatttggaaacatgacgagggtctattaccgagaagctatgggtgcatttattgtcttcgatgtcaccaggccagccacatttgaagcagtggcaaagtggaaaaatgatttggactccaagttaagtctccctaatggcaaaccggtttcagtggttttgttggccaacaaatgtgaccaggggaaggatgtgctcatgaacaatggcctcaagatggaccagttctgcaaggagcacggtttcgtaggatggtttgaaacatcagcaaaggaaaatataaacattgatgaagcctccagatgcctggtgaaacacatacttgcaaatgagtgtgacctaatggagtctattgagccggacgtcgtgaagccccatctcacatcaaccaaggttgccagctgctctggctgtgccaaatcc

SEQ ID NO: 8372 - DNA, 5070 bp, synthetic construct
  source 1..5070: mol_type = other DNA; note = Description of Artificial Sequence: Synthetic polynucleotide
atggcggaacgaggcctggagccgtcgccggccgcggtggcggcgctgccgcctgaagtgcgggcgcagctggcggagctggagctggagctctcggagggggacatcacccagaagggctatgaaaagaaaaggtccaaactcctatctccttacagcccgcagacacaagaaactgattcagcagtacagaaagaacttagaaaccagacacctgctccatctgcagctcaaacttctgctccctctaagtaccaccgaactcgatctgggggagccagggatgaacgatatcgatcagatatccacacagaagcagttcaggctgcactggcaaagcataaagaacagaagatggctttgcccatgccaaccaaaaggcgatccacatttgttcagtctcctgcagatgcctgcacacctcctgacacatcttcggcctctgaggatgagggctctctgagacgccaagctgcgctctctgctgccttgcaacagagcttacagaatgctgagtcctggatcaaccgttcaattcagggatcgtccacttcttcatccgcatcttctacgctgtcccacggagaggtcaaaggaaccagtgggtctctagctgatgtatttgccaatactcgaatagagaatttctctgctcctcctgatgtcactacaactacctcttcctcctcatcatcttcctcaattcgcccagcaaacattgacctgcccccctcggggatagttaaaggcatgcacaaaggatccaacaggtccagccttatggatacagctgatggtgttcctgtcagtagcagagtatctacaaaaatccagcagcttctgaacactctgaaacgacccaaaaggcctcccttaaaggaattttttgtggatgactctgaagaaattgtggaagtacctcagccagaccccaaccagcccaagccggagggacggcagatgacccctgtgaaaggagagcctttaggagtcatctgtaactggcctcctgctcttgaatctgccctgcagcgctggggtaccactcaagcaaaatgctcctgtctgactgcactggacatgacagggaaaccagtttacactcttacatatggaaagttgtggagcagaagtttaaagttggcctacacacttcttaataaactggggaccaaaaatgaacctgtgttaaaacctggagacagggtagccctggtttaccccaacaatgatccagtcatgtttatggtggctttctatggatgcctcctggcagaagtgattccagtgcctatagaggtacctcttaccagaaaggatgctggaggtcagcagattggcttcttgctaggaagctgtggtattgccttagctcttaccagtgaagtttgtctaaaaggactgccaaaaacccagaatggagaaattgtacagtttaaaggttggccccggctcaaatgggttgtaacagattccaagtacctttcaaagccaccgaaagactggcagccacacatctcacctgctgggacagaaccggcatacattgagtataaaacaagcaaagaagggagtgtaatgggagttacagtatcccggcttgcaatgttgtctcactgccaagctctgtcgcaggcctgcaattattctgaaggggaaacaatagtaaatgtcttagactttaagaaggatgctgggctgtggcacggcatgtttgcgaatgtaatgaataagatgcacacaatcagcgtaccctactctgttatgaaaacctgtcctctctcttgggtccaaagagtacatgctcacaaagccaaggtagctttagtaaaatgtcgggacttgcactgggctatgatggcacatcgggaccaaagagacgtgagcttgagttccctccgaatgttaattgtgactgatggagctaacccctggtccgtgtcatcctgtgatgccttcctgagtctgttccaaagtcatggactgaagcctgaggccatctgtccgtgcgccacgtctgctgaagccatgactgtagcaatccgcaggcctggagttccaggagcccctttgccaggaagagccattctctcaatgaatggattgagctatggggtaatacgggtcaatactgaagataaaaattcagcactgacggtccaggatgtagggcatgtaatgcctggtgggatgatgtgcattgtgaaaccagatggacctccccagctctgcaaaacagatgaaattggagaaatctgtgttagctccagaactggaggcatgatgtactttgggcttgctggtgtgacaaaaaatacatttgaggtaattccagtgaattctgcaggctctcctgttggggatgtgccattcatccgatcaggattgctggggtttgtagggccgggtagtttggtgttcgtggttgggaaaatggatggcttactgatggttagtggtcgaagacataatgctgatgacattgttgctactggattggctgtagaatcaataaagactgtttatagaggaagaattgctgtgttttctgtgtctgtattttatgatgagcgcattgtggtggttgcggaacaaagacctgatgcttctgaggaagatagtttccagtggatgagccgcgtgctgcaggcgatcgatagcattcatcaagtgggggtttattgtcttgctctggtgccagccaatacattgccaaaaactccactaggaggaatccatatatctcagacgaaacaactctttctggagggatcactgcatccttgcaacatcctcatgtgcccccatacatgtgtgacaaacttgccaaagccccggcaaaaacaaccaggtgtaggccctgcttccgtgatggttgggaatctggttgctggaaaacgtatagcacaagctgctggaagggatctgggacaaatagaagagaatgatttggtgaggaagcaccagtttctggcagagatcctacagtggcgagcccaggcgactcctgaccatgtactcttcatgctgttaaatgccaagggaaccactgtatgcacagccagctgccttcagcttcataagcgagcagagaggattgcatctgttcttggtgataagggacatctaaatgcaggagataatgtggtgttgctctatccacctggcattgagttaatcgccgccttctatggctgcctgtatgcgggctgtatacctgtgaccgtcagacctccacatgctcagaacctcacggccacgctgcccactgtccgaatgattgttgatgtcagcaaagcagcctgtattctcaccagtcagaccctaatgaggctactgaggtcccgagaggcagcagcagctgtggatgtgaaaacctggccaaccatcattgacacagatgatttacccaggaaaaggttacctcagctgtataaaccgcccactcctgagatgttggcatatcttgattttagtgtctccacaactggcatgcttacaggagtgaagatgtcccactctgcagtgaacgctctgtgtcgagccatcaagctccagtgtgagttgtactcttctcggcagatcgccatctgccttgacccttactgtggacttggcttcgcgctctggtgtctctgcagtgtctattcaggccaccagtctgtcttaattcctcctatggagttagagaacaaccttttcctctggctctccacagtcaaccagtacaaaataagggacactttctgctcctattcagtgatggagctctgcaccaaaggtcttgggaaccaagtggaagtgctaaagaccagagggatcaacctctcctgcgtccggacctgtgtggtggtggcggaggagaggccccgcgttgcactccagcagtccttctctaagctcttcaaagacatcgggctgtccccgcgggctgtcagcaccacttttggatcaagagtcaatgtagcaatatgtttacagggaacctcagggcctgatccgactactgtgtatgtggatctgaaatcactaagacatgacagggttcgtctcgtggaacgtggcgcccctcagagtttgcttctctcagagtctggaaagagatcgggaagtaaacagtccactaaccctgccgataactatcatctggcccggaggagaaccctgcaggtggttgtgagctccttgctgacagaggcagggtttgagagtgccgagaaagcatccgtggaaacgctgacagagatgctgcagagctacatttcagaaattgggagaagtgccaagtcttactgtgagcacacagccaggacccagcccacactgtccgatatcgtggtcacacttgttgagatgggtttcaatgtggacactctccctgcttatgcaaaacggtctcagaggatggtcatcactgctcctccggtgaccaatcagccagtgacccccaaggccctcactgcagggcagaaccgaccccacccgccgcacatccccagccattttcctgagttccctgatccccacacctacatcaaaactccgacgtaccgtgagcccgtgtcagactaccaggtcctgcgggagaaggctgcatcccagaggcgcgatgtggagcgggcacttacccgtttcatggccaagacaggcgagactcagagtcttttcaaagatgacgtcagcacatttccattgattgctgccagacctttcaccatcccctacctgacagctcttcttccgtctgaactggagatgcaacaaatggaagagacagattcctcggagcaggatgaacagacagacacagagaaccttgctcttcatatcagcatgatagagtctcgctccgtcacccaggctggagtgcagtggcaagatcttggctcactgcaacctccgcctcctgggttcaagcgattctccagcctcagcctcctgagtagctggaattacaggaggattctggagccgagaaggagaacacctctgtcctgcagcagaacccctccttgtcgggtagccggaatggggaggagaacatcatcgataacccttatctgcggccgg

SEQ ID NO: 8373 - DNA, 1689 bp, synthetic construct
  source 1..1689: mol_type = other DNA; note = Description of Artificial Sequence: Synthetic polynucleotide
atggaaccccccgcggccaagcggagccggggctgccccgcgggacccgaggagcgcgatgccggggccggggccgcgcgtggccggggccggcccgaggcgctgctggacctcagcgccaagcgggtagccgagagctgggccttcgagcaggtggaggagcggttctcccgggtgcctgagcccgtccagaagcgcatcgtgttttggtcgtttccacgcagtgaacgggaaatatgtatgtactcgtcgctgggttacccgcccccagagggcgagcacgatgcccgggtgccctttacccgcgggctgcacctgctccagagcggggccgtggaccgcgtgttgcaagtgggattccacctgagcggaaacatccgcgagccagggagtcctggagagcccgagcgcctctaccatgtctccatcagctttgatcgctgcaagatcacgtccgtgagctgcggctgtgacaaccgcgacctcttctactgtgcccacgtggtggccctgtccctgtaccgcattcggcacgcccaccaggtggagctgcggctgcccatctccgagacgctctcccagatgaaccgggaccagctgcagaagttcgtgcagtacctcatcagcgcccatcacactgaggtgctgcccactgctcagcgcttggctgatgagatcctcctgctgggctccgagatcaacttggtgaatggtgccccagaccccaccgccggcgcaggaatcgaggacgccaactgctggcacctggacgaggagcagatccaggagcaggtgaagcagctactgtccaatggcggctactacggggccagccagcagctgcgctccatgttcagcaaggtgcgggagatgctgcgaatgcgggactccaacggggcgcgcatgctgattctcatgaccgagcagttcctgcaggacacgcgcctggccctgtggcggcagcagggcgcgggcatgacggacaagtgccggcagctctgggatgagctggggatgttcaatagcccagaaatgcaagccctcctccagcagatctctgagaacccccagctgatgcagaatgtgatctcagcaccctacatgcgcagcatgatgcagacgcttgcccagaaccccgactttgctgctcagatgatggtgaatgtgccgctcttcgcggggaacccccaactgcaggagcagctccgcctgcagctcccagtcttcctgcagcagatgcagaacccagagtcactctccatccttaccaatccccgagccatgcaggcattgctgcagatccagcagggactacagaccttgcagaccgaggcccctgggctggtacccagccttggctcctttgggatatcccggaccccagcaccctcagcaggcagcaacgcagggtctacgcccgaggcccccacttcctcaccagccacgccagccacatcttctccaacaggggcttccagcgcccagcagcaactcatgcagcagatgatccagcttttggctggaagtggaaactcacaggtgcagacgccagaagtgagatttcagcagcagctggagcagctcaactccatgggcttcatcaatcgtgaggctaacctgcaggccctgattgccacaggaggggacatcaacgcagctatcgagagactgctgggctcccagctctcc

SEQ ID NO: 8374 - DNA, 2718 bp, synthetic construct
  source 1..2718: mol_type = other DNA; note = Description of Artificial Sequence: Synthetic polynucleotide
atggacgtccttcccaccggcgggggccgcccggggctccggacggagctggaattccgcggcggcggtggcgaggcgaggctggagagtcaggaggaagaaacgattcctgcagctcccccagccccgcgcctccggggagcggcggagcggccgcggcgctcccgggacacgtgggacggcgatgaggacacggagcccggcgaggcgtgcggcggccgcacaagccgcacggcgtccctggtgagcgggctgctcaacgagctgtacagctgcacagaggaggaggaggcggcgggcgggggccgcggggccgagggccgccggcggcgccgcgacagcctcgacagctccaccgaggcctcgggctccgacgtggtcctgggcggccgcagcggtgccggcgactcccgcgtgctgcaggagctgcaggagcgaccgagccagcggcatcagatgctgtacctgcggcagaaagacgctaatgaactgaagacgatccttcgagagctaaagtacagaattggcatccagtcggccaagttacttcggcatctgaagcagaaagataggcttctgcataaagtgcagaggaactgtgatattgtgactgcctgcttgcaggctgtgtcacagaagagaagagttgataccaagttgaaattcactcttgagccatctttaggtcaaaatggttttcagcagtggtacgatgctctcaaggcagttgccaggctatccacaggaataccaaaggaatggaggagaaaggtttggttgaccttggcagatcattatttgcacagtatagccattgactgggacaaaaccatgcgcttcactttcaatgaaaggagtaatcctgatgatgactccatgggaattcagatagtcaaggaccttcaccgcacaggctgtagttcttactgtggccaggaggctgagcaggacagggttgtgttgaagcgggtgctgctggcctatgcccgatggaacaaaactgttgggtactgccaaggctttaacatcctggctgcactaattctggaagtgatggaaggcaatgaaggggatgccctgaaaattatgatttaccttattgataaggtacttcccgaaagctatttcgtcaataatctccgggcattgtctgtggatatggctgtcttcagagaccttttaagaatgaagctgccggaattatctcagcacctggatactcttcagagaactgcaaacaaagaaagtggaggtggatatgagcccccacttacaaatgtcttcacgatgcagtggtttctgactctctttgccacatgcctccctaatcagaccgttttaaagatctgggattcagtcttctttgaaggttcagaaatcatcctaagggtgtcgctggctatctgggcaaaattaggagaggttatcaatgccgggaagagcacacacaatgaagaccaagccagctgtgaggtgctcactgtgaagaagaaggcaggggccgtgacctcaaccccaaacaggaactcatccaagagacggtcctcccttcccaatggggaagggctgcagctgaaggagaactcggaatccgagggtgtttcctgccactattggtcgctgtttgacgggcacgcggggtccggggccgcggtggtggcgtcacgcctgctgcagcaccacatcacggagcagctgcaggacatcgtggacatcctgaagaactccgccgtcctgccccctacctgcctgggggaggagcctgagaacacgcccgccaacagccggactctgacccgggcagcctccctgcgcggaggggtgggggccccgggctcccccagcacgccccccacacgcttctttaccgagaagaagattccccatgagtgcctggtcatcggagcgcttgaaagtgcattcaaggaaatggacctacagatagaacgagagaggagttcatataatatatctggtggctgcacggccctcattgtgatttgccttttggggaagctgtatgttgcaaatgctggggatagcagggccataatcatcagaaatggagaaattatccccatgtcttcagaatttacccccgagacggagcgccagcgacttcagtacctggcattcatgcagcctcacttgctgggaaatgagttcacacatttggagtttccaaggagagtacagagaaaggagcttggaaagaagatgctctacagggactttaatatgacaggctgggcatacaaaaccattgaggatgaggacttgaagttcccccttatatatggagaaggcaagaaggcccgggtaatggcaactattggagtgaccaggggacttggggaccatgacctgaaggtgcatgactccaacatctacattaaaccattcctgtcttcagctccagaggtaagaatctacgatctttcaaaatatgatcatggatcagatgatgtgctgatcttggccactgatggactctgggacgttttatcaaatgaagaagtagcagaagcaatcactcagtttcttcctaactgtgatccagatgatcctcacaggtacacactggcagctcaggacctggtgatgcgtgcccggggtgtgctgaaggacagaggatggcggatatctaatgaccgactgggctcaggagacgacatttctgtatatgtcattcctttaatacatggaaacaagctgtca

SEQ ID NO: 8375 - DNA, 978 bp, synthetic construct
  source 1..978: mol_type = other DNA; note = Description of Artificial Sequence: Synthetic polynucleotide
atggacaatatgtctattacgaatacaccaacaagtaatgatgcctgtctgagcattgtgcatagtttgatgtgccatagacaaggtggagagagtgaaacatttgcaaaaagagcaattgaaagtttggtaaagaagctgaaggagaaaaaagatgaattggattctttaataacagctataactacaaatggagctcatcctagtaaatgtgttaccatacagagaacattggatgggaggcttcaggtggctggtcggaaaggatttcctcatgtgatctatgcccgtctctggaggtggcctgatcttcacaaaaatgaactaaaacatgttaaatattgtcagtatgcgtttgacttaaaatgtgatagtgtctgtgtgaatccatatcactacgaacgagttgtatcacctggaattgatctctcaggattaacactgcagagtaatgctccatcaagtatgatggtgaaggatgaatatgtgcatgactttgagggacagccatcgttgtccactgaaggacattcaattcaaaccatccagcatccaccaagtaatcgtgcatcgacagagacatacagcaccccagctctgttagccccatctgagtctaatgctaccagcactgccaactttcccaacattcctgtggcttccacaagtcagcctgccagtatactggggggcagccatagtgaaggactgttgcagatagcatcagggcctcagccaggacagcagcagaatggatttactggtcagccagctacttaccatcataacagcactaccacctggactggaagtaggactgcaccatacacacctaatttgcctcaccaccaaaacggccatcttcagcaccacccgcctatgccgccccatcccggacattactggcctgttcacaatgagcttgcattccagcctcccatttccaatcatcctggtgtggttccagaaccgacgggc

SEQ ID NO: 8376 - DNA, 771 bp, synthetic construct
  source 1..771: mol_type = other DNA; note = Description of Artificial Sequence: Synthetic polynucleotide
atggcggcggcggcgggcgcccctccgccgggtcccccgcaaccgcctccgccgccgccgcccgaggagtcgtccgacagcgagcccgaggcggagcccggctccccacagaagctcatccgcaaggtgtccacgtcgggtcagatccgacagaagaccatcatcaaagaggggatgctgaccaaacagaacaattcattccagcgatcaaaaaggagatactttaagcttcgagggcgaacgctttactatgccaaaacggcaaagtcaatcatatttgatgaggtggatctgacagatgccagcgtagctgaatccagtaccaaaaacgtcaacaacagttttacggttgaggtcctagatgagaacaacttggtcatgaatttagagttcagcatccgggagactacatgcaggaaggattctggagaagatcccgctacatgtgccttccagagggactactatgtgtccacagctgtttgcagaagcaccgtgaaggtatctgcccagcaggtgcagggcgtgcatgctcgctgcagctggtcctcctccacgtctgagtcttacagcagcgaagagatgatttttggggacatgttgggatctcataaatggagaaacaattatctatttggtctcatttcagacgagtccataagtgaacaattttatgatcggtcacttgggatcatgagaagggtattgcctcctggaaacagaaggtacccaaaccaccggcacagagcaagaataaatactgactttgag

SEQ ID NO: 8377 - protein, 1017 aa, synthetic construct; identical to SEQ ID NO: 11
  source 1..1017: note = Description of Artificial Sequence: Synthetic polypeptide

SEQ ID NO: 8378 - protein, 528 aa, synthetic construct
  source 1..528: note = Description of Artificial Sequence: Synthetic polypeptide
MGETMSKRLKLHLGGEAEMEERAFVNPFPDYEAAAGALLASGAAEETGCVRPPATTDEPGLPFHQDGKIIHNFIRRIQTKIKDLLQQMEEGLKTADPHDCSAYTGWTGIALLYLQLYRVTCDQTYLLRSLDYVKRTLRNLNGRRVTFLCGDAGPLAVGAVIYHKLRSDCESQECVTKLLQLQRSVVCQESDLPDELLYGRAGYLYALLYLNTEIGPGTVCESAIKEVVNAIIESGKTLSREERKTERCPLLYQWHRKQYVGAAHGMAGIYYMLMQPAAKVDQETLTEMVKPSIDYVRHKKFRSGNYPSSLSNETDRLVHWCHGAPGVIHMLMQAYKGLLPFAVVGSTDEVKVGKRMVRGRHYPWGVLQVENENHCDFVKLRDMLLCTNMENLKEKTHTQHYECYRYQKLQKMGFTDVGPNNQPVSFQEIFEAKRQEFYDQCQREEEELKQRFMQRVKEKEATFKEAEKELQDKFEHLKMIQQEEIRKLEEEKKQLEGEIIDFYKMKAASEALQTQLSTDTKKDKHRKK

SEQ ID NO: 8379 - protein, 1041 aa, synthetic construct; identical to SEQ ID NO: 5
  source 1..1041: note = Description of Artificial Sequence: Synthetic polypeptide

SEQ ID NO: 8380 - protein, 951 aa, synthetic construct
  source 1..951: note = Description of Artificial Sequence: Synthetic polypeptide
MGAPACALALCVAVAIVAGASSESLGTEQRVVGRAAEVPGPEPGQQEQLVFGSGDAVELSCPPPGGGPMGPTVWVKDGTGLVPSERVLVGPQRLQVLNASHEDSGAYSCRQRLTQRVLCHFSVRVTDAPSSGDDEDGEDEAEDTGVDTGAPYWTRPERMDKKLLAVPAANTVRFRCPAAGNPTPSISWLKNGREFRGEHRIGGIKLRHQQWSLVMESVVPSDRGNYTCVVENKFGSIRQTYTLDVLERSPHRPILQAGLPANQTAVLGSDVEFHCKVYSDAQPHIQWLKHVEVNGSKVGPDGTPYVTVLKSWISESVEADVRLRLANVSERDGGEYLCRATNFIGVAEKAFWLSVHGPRAAEEELVEADEAGSVYAGILSYGVGFFLFILVVAAVTLCRLRSPPKKGLGSPTVHKISRFPLKRQVSLESNASMSSNTPLVRIARLSSGEGPTLANVSELELPADPKWELSRARLTLGKPLGEGCFGQVVMAEAIGIDKDRAAKPVTVAVKMLKDDATDKDLSDLVSEMEMMKMIGKHKNIINLLGACTQGGPLYVLVEYAAKGNLREFLRARRPPGLDYSFDTCKPPEEQLTFKDLVSCAYQVARGMEYLASQKCIHRDLAARNVLVTEDNVMKIADFGLARDVHNLDYYKKTTNGRLPVKWMAPEALFDRVYTHQSDVWSFGVLLWEIFTLGGSPYPGIPVEELFKLLKEGHRMDKPANCTHDLYMIMRECWHAAPSQRPTFKQLVEDLDRVLTVTSTDVKATQEENRELRSRCEELHGKNLELGKIMDRFEEVVYQAMEEVQKQKELSKAEIQKVLKEKDQLTTDLNSMEKSFSDLFKRFEKQKEVIEGYRKNEESLKKCVEDYLARITQEGQRYQALKAHAEEKLQLANEEIAQVRSKAQAEALALQASLRKEQMRIQSLEKTVEQKTKENEELTRICDDLISKMEKI

SEQ ID NO: 8381 - protein, 528 aa, synthetic construct; identical to SEQ ID NO: 8378
  source 1..528: note = Description of Artificial Sequence: Synthetic polypeptide

SEQ ID NO: 8382 - protein, 1041 aa, synthetic construct; identical to SEQ ID NO: 5
  source 1..1041: note = Description of Artificial Sequence: Synthetic polypeptide

SEQ ID NO: 8383 - protein, 1050 aa, synthetic construct
  source 1..1050: note = Description of Artificial Sequence: Synthetic polypeptide
MGAPACALALCVAVAIVAGASSESLGTEQRVVGRAAEVPGPEPGQQEQLVFGSGDAVELSCPPPGGGPMGPTVWVKDGTGLVPSERVLVGPQRLQVLNASHEDSGAYSCRQRLTQRVLCHFSVRVTDAPSSGDDEDGEDEAEDTGVDTGAPYWTRPERMDKKLLAVPAANTVRFRCPAAGNPTPSISWLKNGREFRGEHRIGGIKLRHQQWSLVMESVVPSDRGNYTCVVENKFGSIRQTYTLDVLERSPHRPILQAGLPANQTAVLGSDVEFHCKVYSDAQPHIQWLKHVEVNGSKVGPDGTPYVTVLKSWISESVEADVRLRLANVSERDGGEYLCRATNFIGVAEKAFWLSVHGPRAAEEELVEADEAGSVYAGILSYGVGFFLFILVVAAVTLCRLRSPPKKGLGSPTVHKISRFPLKRQVSLESNASMSSNTPLVRIARLSSGEGPTLANVSELELPADPKWELSRARLTLGKPLGEGCFGQVVMAEAIGIDKDRAAKPVTVAVKMLKDDATDKDLSDLVSEMEMMKMIGKHKNIINLLGACTQGGPLYVLVEYAAKGNLREFLRARRPPGLDYSFDTCKPPEEQLTFKDLVSCAYQVARGMEYLASQKCIHRDLAARNVLVTEDNVMKIADFGLARDVHNLDYYKKTTNGRLPVKWMAPEALFDRVYTHQSDVWSFGVLLWEIFTLGGSPYPGIPVEELFKLLKEGHRMDKPANCTHDLYMIMRECWHAAPSQRPTFKQLVEDLDRVLTVTSTDFKESALRKQSLYLKFDPLLRDSPGRPVPVATETSSMHGANETPSGRPREAKLVEFDFLGALDIPVPGPPPGVPAPGGPPLSTGPIVDLLQYSQKDLDAVVKATQEENRELRSRCEELHGKNLELGKIMDRFEEVVYQAMEEVQKQKELSKAEIQKVLKEKDQLTTDLNSMEKSFSDLFKRFEKQKEVIEGYRKNEESLKKCVEDYLARITQEGQRYQALKAHAEEKLQLANEEIAQVRSKAQAEALALQASLRKEQMRIQSLEKTVEQKTKENEELTRICDDLISKMEKI

SEQ ID NO: 8384 - protein, 1232 aa, synthetic construct
  source 1..1232: note = Description of Artificial Sequence: Synthetic polypeptide
MARQPPPPWVHAAFLLCLLSLGGAIEIPMDLTQPPTITKQSAKDHIVDPRDNILIECEAKGNPAPSFHWTRNSRFFNIAKDPRVSMRRRSGTLVIDFRSGGRPEEYEGEYQCFARNKFGTALSNRIRLQVSKSPLWPKENLDPVVVQEGAPLTLQCNPPPGLPSPVIFWMSSSMEPITQDKRVSQGHNGDLYFSNVMLQDMQTDYSCNARFHFTHTIQQKNPFTLKVLTNHPYNDSSLRNHPDMYSARGVAERTPSFMYPQGTASSQMVLRGMDLLLECIASGVPTPDIAWYKKGGDLPSDKAKFENFNKALRITNVSEEDSGEYFCLASNKMGSIRHTISVRVKAAPYWLDEPKNLILAPGEDGRLVCRANGNPKPTVQWMVNGEPLQSAPPNPNREVAGDTIIFRDTQISSRAVYQCNTSNEHGYLLANAFVSVLDVPPRMLSPRNQLIRVILYNRTRLDCPFFGSPIPTLRWFKNGQGSNLDGGNYHVYENGSLEIKMIRKEDQGIYTCVATNILGKAENQVRLEVKDPTRIYRMPEDQVARRGTTVQLECRVKHDPSLKLTVSWLKDDEPLYIGNRMKKEDDSLTIFGVAERDQGSYTCVASTELDQDLAKAYLTVLADQATPTNRLAALPKGRPDRPRDLELTDLAERSVRLTWIPGDANNSPITDYVVQFEEDQFQPGVWHDHSKYPGSVNSAVLRLSPYVNYQFRVIAINEVGSSHPSLPSERYRTSGAPPESNPGDVKGEGTRKNNMEITWTPMNATSAFGPNLRYIVKWRRRETREAWNNVTVWGSRYVVGQTPVYVPYEIRVQAENDFGKGPEPESVIGYSGEDYTNSTSGDPVEKKDETPFGVSVAVGLAVFACLFLSTLLLVLNKCGRRNKFGINRPAVLAPEDGLAMSLHFMTLGGSSLSPTEGKGSGLQGHIIENPQYFSDACVHHIKRRDIVLKWELGEGAFGKVFLAECHNLLPEQDKMLVAVKALKEASESARQDFQREAELLTMLQHQHIVRFFGVCTEGRPLLMVFEYMRHGDLNRFLRSHGPDAKLLAGGEDVAPGPLGLGQLLAVASQVAAGMVYLAGLHFVHRDLATRNCLVGQGLVVKIGDFGMSRDIYSTDYYRVGGRTMLPIRWMPPESILYRKFTTESDVWSFGVVLWEIFTYGKQPWYQLSNTEAIDCITQGRELERPRACPPEVYAIMRGCWQREPQQRHSIKDVHARLQALAQAPPVYLDVLG

SEQ ID NO: 8385 - protein, 1041 aa, synthetic construct; identical to SEQ ID NO: 5
  source 1..1041: note = Description of Artificial Sequence: Synthetic polypeptide

SEQ ID NO: 8386 - protein, 1041 aa, synthetic construct; identical to SEQ ID NO: 5
  source 1..1041: note = Description of Artificial Sequence: Synthetic polypeptide

SEQ ID NO: 8387 - protein, 355 aa, synthetic construct
  source 1..355: note = Description of Artificial Sequence: Synthetic polypeptide
MFKRMAEFGPDSGGRVKGVTIVKPIVYGNVARYFGKKREEDGHTHQWTVYVKPYRNEDMSAYVKKIQFKLHESYGNPLRVVTKPPYEITETGWGEFEIIIKIFFIDPNERPVTLYHLLKLFQSDTNAMLGKKTVVSEFYDEMIFQDPTAMMQQLLTTSRQLTLGAYKHETEYPYVKLLLDAMKHSGCAVNKDRHFSCEDCNGNVSGGFDASTSQIVLCQNNIHNQAHMNRVVTHELIHAFDHCRAHVDWFTNIRHLACSEVRAANLSGDCSLVNEIFRLHFGLKQHHQTCVRDRATLSILAVRNISKEVAKKAVDEVFESCFNDHEPFGRIPHNKTYARYAHRDFENRDRYYSNI

SEQ ID NO: 8388 - protein, 986 aa, synthetic construct
  source 1..986: note = Description of Artificial Sequence: Synthetic polypeptide
MGAPACALALCVAVAIVAGASSESLGTEQRVVGRAAEVPGPEPGQQEQLVFGSGDAVELSCPPPGGGPMGPTVWVKDGTGLVPSERVLVGPQRLQVLNASHEDSGAYSCRQRLTQRVLCHFSVRVTDAPSSGDDEDGEDEAEDTGVDTGAPYWTRPERMDKKLLAVPAANTVRFRCPAAGNPTPSISWLKNGREFRGEHRIGGIKLRHQQWSLVMESVVPSDRGNYTCVVENKFGSIRQTYTLDVLERSPHRPILQAGLPANQTAVLGSDVEFHCKVYSDAQPHIQWLKHVEVNGSKVGPDGTPYVTVLKSWISESVEADVRLRLANVSERDGGEYLCRATNFIGVAEKAFWLSVHGPRAAEEELVEADEAGSVYAGILSYGVGFFLFILVVAAVTLCRLRSPPKKGLGSPTVHKISRFPLKRQVSLESNASMSSNTPLVRIARLSSGEGPTLANVSELELPADPKWELSRARLTLGKPLGEGCFGQVVMAEAIGIDKDRAAKPVTVAVKMLKDDATDKDLSDLVSEMEMMKMIGKHKNIINLLGACTQGGPLYVLVEYAAKGNLREFLRARRPPGLDYSFDTCKPPEEQLTFKDLVSCAYQVARGMEYLASQKCIHRDLAARNVLVTEDNVMKIADFGLARDVHNLDYYKKTTNGRLPVKWMAPEALFDRVYTHQSDVWSFGVLLWEIFTLGGSPYPGIPVEELFKLLKEGHRMDKPANCTHDLYMIMRECWHAAPSQRPTFKQLVEDLDRVLTVTSTDVPGPPPGVPAPGGPPLSTGPIVDLLQYSQKDLDAVVKATQEENRELRSRCEELHGKNLELGKIMDRFEEVVYQAMEEVQKQKELSKAEIQKVLKEKDQLTTDLNSMEKSFSDLFKRFEKQKEVIEGYRKNEESLKKCVEDYLARITQEGQRYQALKAHAEEKLQLANEEIAQVRSKAQAEALALQASLRKEQMRIQSLEKTVEQKTKENEELTRICDDLISKMEKI

SEQ ID NO: 8389 - protein, 365 aa, synthetic construct
  source 1..365: note = Description of Artificial Sequence: Synthetic polypeptide
MHGGGPPSGDSACPLRTIKRVQFGVLSPDELVPVLRMVEGDTIYDYCWYSLMSSAQPDTSYVASSSRENPIHIWDAFTGELRASFRAYNHLDELTAAHSLCFSPDGSQLFCGFNRTVRVFSTARPGRDCEVRATFAKKQGQSGIISCIAFSPAQPLYACGSYGRSLGLYAWDDGSPLALLGGHQGGITHLCFHPDGNRFFSGARKDAELLCWDLRQSGYPLWSLGREVTTNQRIYFDLDPTGQFLVSGSTSGAVSVWDTDGPGNDGKPEPVLSFLPQKDCTNGVSLHPSLPLLATASGQRVFPEPTESGDEGEELGLPLLSTRHVHLECRLQLWWCGGAPDSSIPDDHQGEKGQGGTEGGVGELI

SEQ ID NO: 8390 - protein, 1041 aa, synthetic construct; identical to SEQ ID NO: 5
  source 1..1041: note = Description of Artificial Sequence: Synthetic polypeptide

SEQ ID NO: 8391 - protein, 155 aa, synthetic construct
  source 1..155: note = Description of Artificial Sequence: Synthetic polypeptide
MADFDTYDDRAYSSFGGGRGSRGSAGGHGSRSQKELPTEPPYTAYVGNLPFNTVQGDIDAIFKDLSIRSVRLVRDKDTDKFKGFCYVEFDEVDSLKEALTYDGALLGDRSLRVDIAEGRKQDKGGFGFRKGGPDDREIKETDGSSQIKQEPDPTW

SEQ ID NO: 8392 - protein, 228 aa, synthetic construct
  source 1..228: note = Description of Artificial Sequence: Synthetic polypeptide
MLTMSVTLSPLRSQDLDPMATDASPMAINMTPTVEQGEGEEAMKDMDSDQQYEKPPPLHTGADWKIVLHLPEIETWLRMTSERVRDLTYSVQQDSDSKHVDVHLVQLKAMVACYPGNGTGYVRHVDNPNGDGRCITCIYYLNKNWDAKLHGGILRIFPEGKSFIADVEPIFDRLLFFWSDRRNPHEVQPSYATRYAMTVWYFDAEERAEAKKKFRNLTRKTESALTED

SEQ ID NO: 8393 - protein, 328 aa, synthetic construct
  source 1..328: note = Description of Artificial Sequence: Synthetic polypeptide
MATEGGGKEMNEIKTQFTTREGLYKLLPHSEYSRPNRVPFNSQGSNPVRVSFVNLNDQSGNGDRLCFNVGRELYFYIYKGVRKEIDPSLGVAELPDEFFEEDNMLSMGKKMMQEAMSAFPGIDEAMSYAEVMRLVKGMNFSVVVFDTAPTGHTLRLLNFPTIVERGLGRLMQIKNQISPFISQMCNMLGLGDMNADQLASKLEETLPVIRSVSEQFKDPEQTTFICVCIAEFLSLYETERLIQELAKCKIDTHNIIVNQLVFPDPEKPCKMCEARHKIQAKYLDQMEDLYEDFHIVKLPLLPHEVRGADKVNTFSALLLEPYKPPSAQ

SEQ ID NO: 8394 - protein, 331 aa, synthetic construct
  source 1..331: note = Description of Artificial Sequence: Synthetic polypeptide
MAAAAAAGAGPEMVRGQVFDVGPRYTNLSYIGEGAYGMVCSAYDNVNKVRVAIKKISPFEHQTYCQRTLREIKILLRFRHENIIGINDIIRAPTIEQMKDVYIVQDLMETDLYKLLKTQHLSNDHICYFLYQILRGLKYIHSANVLHRDLKPSNLLLNTTCDLKALSLCNYFESQNVDFRGKKVIELGAGTGIVGILAALQGGDVTITDLPLALEQIQGNVQANVPAGGQAQVRALSWGIDHHVFPANYDLVLGADIVYLEPTFPLLLGTLQHLCRPHGTIYLASKMRKEHGTESFFQHLLPQHFQLELAQRDEDENVNIYRARHREPRPA

SEQ ID NO: 8395 - protein, 1255 aa, synthetic construct
  source 1..1255: note = Description of Artificial Sequence: Synthetic polypeptide
MAQLFLPLLAALVLAQAPAALADVLEGDSSEDRAFRVRIAGDAPLQGVLGGALTIPCHVHYLRPPPSRRAVLGSPRVKWTFLSRGREAEVLVARGVRVKVNEAYRFRVALPAYPASLTDVSLALSELRPNDSGIYRCEVQHGIDDSSDAVEVKVKGVVFLYREGSARYAFSFSGAQEACARIGAHIATPEQLYAAYLGGYEQCDAGWLSDQTVRYPIQTPREACYGDMDGFPGVRNYGVVDPDDLYDVYCYAEDLNGELFLGDPPEKLTLEEARAYCQERGAEIATTGQLYAAWDGGLDHCSPGWLADGSVRYPIVTPSQRCGGGLPGVKTLFLFPNQTGFPNKHSRFNVYCFRDSAQPSAIPEASNPASNPASDGLEAIVTVTETLEELQLPQEATESESRGAIYSIPIMEDGGGGSSTPEDPAEAPRTLLEFETQSMVPPTGFSEEEGKALEEEEKYEDEEEKEEEEEEEEVEDEALWAWPSELSSPGPEASLPTEPAAQEESLSQAPARAVLQPGASPLPDGESEASRPPRVHGPPTETLPTPRERNLASPSPSTLVEAREVGEATGGPELSGVPRGESEETGSSEGAPSLLPATRAPEGTRELEAPSEDNSGRTAPAGTSVQAQPVLPTDSASRGGVAVVPASGDCVPSPCHNGGTCLEEEEGVRCLCLPGYGGDLCDVGLRFCNPGWDAFQGACYKHFSTRRSWEEAETQCRMYGAHLASISTPEEQDFINNRYREYQWIGLNDRTIEGDFLWSDGVPLLYENWNPGQPDSYFLSGENCVVMVWHDQGQWSDVPCNYHLSYTCKMGLVSCGPPPELPLAQVFGRPRLRYEVDTVLRYRCREGLAQRNLPLIRCQENGRWEAPQISCVPRRPVSVAVGLAVFACLFLSTLLLVLNKCGRRNKFGINRPAVLAPEDGLAMSLHFMTLGGSSLSPTEGKGSGLQGHIIENPQYFSDACVHHIKRRDIVLKWELGEGAFGKVFLAECHNLLPEQDKMLVAVKALKEASESARQDFQREAELLTMLQHQHIVRFFGVCTEGRPLLMVFEYMRHGDLNRFLRSHGPDAKLLAGGEDVAPGPLGLGQLLAVASQVAAGMVYLAGLHFVHRDLATRNCLVGQGLVVKIGDFGMSRDIYSTDYYRVGGRTMLPIRWMPPESILYRKFTTESDVWSFGVVLWEIFTYGKQPWYQLSNTEAIDCITQGRELERPRACPPEVYAIMRGCWQREPQQRHSIKDVHARLQALAQAPPVYLDVLG

SEQ ID NO: 8396 - protein, 906 aa, synthetic construct
  source 1..906: note = Description of Artificial Sequence: Synthetic polypeptide
MDQVMQFVEPSRQFVKDSIRLVKRCTKPDRKVCNGIGIGEFKDSLSINATNIKHFKNCTSISGDLHILPVAFRGDSFTHTPPLDPQELDILKTVKEITGFLLIQAWPENRTDLHAFENLEIIRGRTKQHGQFSLAVVSLNITSLGLRSLKEISDGDVIISGNKNLCYANTINWKKLFGTSGQKTKIISNRGENSCKATGQVCHALCSPEGCWGPEPRDCVSCRNVSRGRECVDKCNLLEGEPREFVENSECIQCHPECLPQAMNITCTGRGPDNCIQCAHYIDGPHCVKTCPAGVMGENNTLVWKYADAGHVCHLCHPNCTYGCTGPGLEGCPTNGPKIPSIATGMVGALLLLLVVALGIGLFMRRRHIVRKRTLRRLLQERELVEPLTPSGEAPNQALLRILKETEFKKIKVLGSGAFGTVYKGLWIPEGEKVKIPVAIKELREATSPKANKEILDEAYVMASVDNPHVCRLLGICLTSTVQLITQLMPFGCLLDYVREHKDNIGSQYLLNWCVQIAKGMNYLEDRRLVHRDLAARNVLVKTPQHVKITDFGLAKLLGAEEKEYHAEGGKVPIKWMALESILHRIYTHQSDVWSYGVTVWELMTFGSKPYDGIPASEISSILEKGERLPQPPICTIDVYMIMVKCWMIDADSRPKFRELIIEFSKMARDPQRYLVIQGDERMHLPSPTDSNFYRALMDEEDMDDVVDADEYLIPQQGFFSSPSTSRTPLLSSLSATSNNSTVACIDRNGLQSCPIKEDSFLQRYSSDPTGALTEDSIDDTFLPVPEYINQSVPKRPAGSVQNPVYHNQPLNPAPSRDPHYQDPHSTAVGNPEYLNTVQPTCVNSTFDSPAHWAQKGSHQISLDNPDYQQDFFPKEAKPNGIFKGSTAENAEYLRVAPQSSEFIGA

SEQ ID NO: 8397 - protein, 297 aa, synthetic construct
  source 1..297: note = Description of Artificial Sequence: Synthetic polypeptide
MRQSLLFLTSVVPFVLAPRPPDDPGFGPHQRLEKLDSLLSDYDILSLSNIQQHSVRKRDLQTSTHVETLLTFSALKRHFKLYLTSSTERFSQNFKVVVVDGKNESEYTVKWQDFFTGHVVGEPDSRVLAHIRDDDVIIRINTDGAEYNIEELLDKYLIANATNPESKVFYLKMKGDYFRYLAEVACGDDRKQTIDNSQGAYQEAFDISKKEMQPTHPIRLGLALNFSVFYYEILNNPELACTLAKTAFDEAIAELDTLNEDSYKDSTLIMQLLRDNLTLWTSDSAGEECDAAEGAEN

SEQ ID NO: 8398 - protein, 254 aa, synthetic construct
  source 1..254: note = Description of Artificial Sequence: Synthetic polypeptide
MEEDGVRKCKKCEGPCRKVCNGIGIGEFKDSLSINATNIKHFKNCTSISGDLHILPVAFRGDSFTHTPPLDPQELDILKTVKEITGFLLIQAWPENRTDLHAFENLEIIRGRTKQQDQTTVSSVPTTLTAPTASRPARQESWEKTTPWSGSTQTPAMCATCAIQTAPTDALGQVLKAVQRMGLRSRPSPLGWWGPSSCCWWWPWGSASSCEGATSFGSARCGGCCRRGRYRFDPRLMFSNRGSVRTRRFSKHLL

SEQ ID NO: 8399 - protein, 281 aa, synthetic construct
  source 1..281: note = Description of Artificial Sequence: Synthetic polypeptide
MADPGPDPESESESVFPREVGLFADSYSEKSQFCFCGHVLTITQNFGSRLGVAARVWDAALSLCNYFESQNVDFRGKKVIELGAGTGIVGILAALQVELSPLFPDTLILGLEIRVKVSDYVQDRIRALRAAPAGGFQNIACLRSNAMKHLPNFFYKGQLTKMFFLFPDPHFKRTKHKWRIISPTLLAEYAYVLRVGGLVYTITDVLELHDWMCTHFEEHPLFERVPLEDLSEDPVVGHLGTSTEEGKKVLRNGGKNFPAIFRRIQDPVLQAVTSQTSLPGH

SEQ ID NO: 8400 - protein, 245 aa, synthetic construct
  source 1..245: note = Description of Artificial Sequence: Synthetic polypeptide
MVPAAGRRPPRVMRLLGWWQVLLWVLGLPVRGVEGYNVSLLYDLENLPASKDSIVHQAGMLKRNCFASVFEKYFQFQEEGKEGENRAVIHYRDDETMYVESKKDRVTVVFSTVFKDDDDVVIGKVFMQEFKEGRRASHTAPQVLFSHREPPLELKDTDAAVGDNIGYITFVLFPRHTNASARDNTINLIHTFRDYLHYHIKCSKAYIHTRMRAKTSDFLKVLNRARPDAEKKEMKTITGKTFSSR

SEQ ID NO: 8401 - protein, 407 aa, synthetic construct
  source 1..407: note = Description of Artificial Sequence: Synthetic polypeptide
MDGFAGSLGTLHVGDEIREINGISVANQTVEQLQKMLREMRGSITFKIVPSYRTQSSSCERDSPSTSRQSPANGHSSTNNSVSDLPSTTQPKGRQIYVRAQFEYDPAKDDLIPCKEAGIRFRVGDIIQIISKDDHNWWQGKLENSKNGTAGLIPSPELQEWRVACIAMEKTKQEQQASCTWFGKKKKQYKDKYLAKHNAVFDQLDLVTYEEVVKLPAFKRKTLVLLGAHGVGRRHIKNTLITKHPDRFAYPIPHTTRPPKKDEENGKNYYFVSHDQMMQDISNNEYLEYGSHEDAMYGTKLETIRKIHEQGLIAILDVEPQALKVLRTAEFAPFVVFIAAPTITPGLNEDESLQRLQKESDILQRTYAHYFDLTIINNEIDETIRHLEEAVELVCTAPQWVPVSWVY

SEQ ID NO: 8402 - protein, 102 aa, synthetic construct
  source 1..102: note = Description of Artificial Sequence: Synthetic polypeptide
MSGQLERCEREWHELEGEFQELQDMKNATLSLNSNDSEPKYYPIAVLLKNQNQELPEDVNPAKKENYLSEQDFVSVFGITRGQFAALPGWKQLQMKKEKGLF

SEQ ID NO: 8403 - protein, 1262 aa, synthetic construct
  source 1..1262: note = Description of Artificial Sequence: Synthetic polypeptide
MGGPQDKDERTIALVRPWPWGHQALDPAYGLDTMHPSRRSLPFPLNCQLARVGTADYGSPSDQSDQQLDCALDLMRRLPPQQIEKNLSDLIDLDVPVEALTTVKPYCNEIHAQAQLWLKRDPKASYDAWKKCLPIRGIDGNGKAPSKSELRHLYLTEKYVWRWKQFLSRRGKRTSPLDLKLGHNNWLRQVLFTPATQAARQAACTIVEALATIPSRKQQVLDLLTSYLDELSIAGECAAEYLALYQKLITSAHWKVYLAARGVLPYVGNLITKEIARLLALEEATLSTDLQQGYALKSLTGLLSSFVEVESIKRHFKSRLVGTVLNGYLCLRKLVVQRTKLIDETQDMLLEMLEDMTTGTESETKAFMAVCIETAKRYNLDDYRTPVFIFERLCSIIYPEENEVTEFFVTLEKDPQQEDFLQGRMPGNPYSSNEPGIGPLMRDIKNKICQDCDLVALLEDDSGMELLVNNKIISLDLPVAEVYKKVWCTTNEGEPMRIVYRMRGLLGDATEEFIESLDSTTDEEEDEEEVYKMAGVMAQCGGLECMLNRLAGIRDFKQGRHLLTVLLKLFSYCVKVKVNRQQLVKLEMNTLNVMLGTLNLALVAEQESKDSGGAAVAEQVLSIMEIILDESNAEPLSEDKGNLLLTGDKDQLVMLLDQINSTFVRSNPSVLQGLLRIIPYLSFGEVEKMQILVERFKPYCNFDKYDEDHSGDDKVFLDCFCKIAAGIKNNSNGHQLKDLILQKGITQNALDYMKKHIPSAKNLDADIWKKFLSRPALPFILRLLRGLAIQHPGTQVLIGTDSIPNLHKLEQVSSDEGIGTLAENLLEALREHPDVNKKIDAARRETRAEKKRMAMAMRQKALGTLGMTTNEKGQVVTKTALLKQMEELIEEPGLTCCICREGYKFQPTKVLGIYTFTKRVALEEMENKPRKQQGYSTVSHFNIVHYDCHLAAVRLARGREEWESAALQNANTKCNGLLPVWGPHVPESAFATCLARHNTYLQECTGQREPTYQLNIHDIKLLFLRFAMEQSFSADTGGGGRESNIHLIPYIIHTVLYVLNTTRATSREEKNLQGFLEQPKEKWVESAFEVDGPYYFTVLALHILPPEQWRATRVEILRRLLVTSQARAVAPGGATRLTDKAVKDYSAYRSSLLFWALVDLIYNMFKKQTTPTVGGIDTGSLEPCVCEKVPTSNTEGGWSCSLAEYIRHNDMPIYEAADKALKTFQEEFMPVETFSEFLDVAGLLSEITDPESFLKDLLNSVP

SEQ ID NO: 8404 - protein, 848 aa, synthetic construct
  source 1..848: note = Description of Artificial Sequence: Synthetic polypeptide
MNGQLDLSGKLIIKAQLGEDIRRIPIHNEDITYDELVLMMQRVFRGKLLSNDEVTIKYKDEDGDLITIFDSSDLSFAIQCSRILKLTLFGKSTSSSSTPTEFCRNGGTWENGRCICTEEWKGLRCTIANFCENSTYMGFTFARIPVGRYGPSLQTCGKDTPNAGNPMAVRLCSLSLYGEIELQKVTIGNCNENLETLEKQVKDVTAPLNNISSEVQILTSDANKLTAENITSATRVVGQIFNTSRNASPEAKKVAIVTVSQLLDASEDAFQRVAATANDDALTTLIEQMETYSLSLGNQSVVEPNIAIQSANFSSENAVGPSNVRFSVQKGASSSLVSSSTFIHTNVDGLNPDAQTELQVLLNMTKNYTKTCGFVVYQNDKLFQSKTFTAKSDFSQKIISSKTDENEQDQSASVDMVFSPKYNQKEFQLYSYACVYWNLSAKDWDTYGCQKDKGTDGFLRCRCNHTTNFAVLMTFKKDYQYPKSLDILSNVGCALSVTGLALTVIFQIVTRKVRKTSVTWVLVNLCISMLIFNLLFVFGIENSNKNLQTSDGDINNIDFDNNDIPRTDTINIPNPMCTAIAALLHYFLLVTFTWNALSAAQLYYLLIRTMKPLPRHFILFISLIGWGVPAIVVAITVGVIYSQNGNNPQWELDYRQEKICWLAIPEPNGVIKSPLLWSFIVPVTIILISNVVMFITISIKVLWKNNQNLTSTKKVSSMKKIVSTLSVAVVFGITWILAYLMLVNDDSIRIVFSYIFCLFNTTQGLQIFILYTVRTKVFQSEASKVLMLLSSIGRRKSLPSVTRPRLRVKMYNFLRSLPTLHERFRLLETSPSTEEITLSESDNAKESI

SEQ ID NO: 8405 - protein, 110 aa, synthetic construct
  source 1..110: note = Description of Artificial Sequence: Synthetic polypeptide
MAPARLFALLLFFVGGVAESDYKGQKLAEQMFQGIILFSAIVGFIYGYVAEQFGWTVYIVMAGFAFSCLLTLPPWPIYRRHPLKWLPVQESSTDDKKPGERKIKRHAKNN

SEQ ID NO: 8406 - protein, 1121 aa, synthetic construct
  source 1..1121: note = Description of Artificial Sequence: Synthetic polypeptide
MRSIRKRWTICTISLLLIFYKTKEIARTEEHQETQLIGDGELSLSRSLVNSSDKIIRKAGSSIFQHNVEGWKINSSLVLEIRKNILRFLDAERDVSVVKSSFKPGDVIHYVLDRRRTLNISHDLHSLLPEVSPMKNRRFKTCAVVGNSGILLDSECGKEIDSHNFVIRCNLAPVVEFAADVGTKSDFITMNPSVVQRAFGGFRNESDREKFVHRLSMLNDSVLWIPAFMVKGGEKHVEWVNALILKNKLKVRTAYPSLRLIHAVRGFCDEGTCTDKANILYAWARNAPPTRLPKGVGFRVGGETGSKYFVLQVHYGDISAFRDNNKDCSGVSLHLTRLPQPLIAGMYLMMSVDTVIPAGEKVVNSDISCHYKNYPMHVFAYRVHTHHLGKVVSGYRVRNGQWTLIGRQSPQLPQAFYPVGHPVDVSFGDLLAARCVFTGEGRTEATHIGGTSSDEMCNLYIMYYMEAKHAVSFMTCTQNVAPDMFRTIPPEANIPIPVKSDMVMMHEHHKETEYKDKIPLLQQPKREEEEVLDQGDFYSLLSKLLGEREDVVHVHKYNPTEKAESESDLVAEIANVVQKKDLGRSDAREGAEHERGNAILVRDRIHKFHRLVSTLRPPESRVFSLQQPPPGEGTWEPEHTGDFHMEEALDWPGVYLLPGQVSGVALDPKNNLVIFHRGDHVWDGNSFDSKFVYQQIGLGPIEEDTILVIDPNNAAVLQSSGKNLFYLPHGLSIDKDGNYWVTDVALHQVFKLDPNNKEGPVLILGRSMQPGSDQNHFCQPTDVAVDPGTGAIYVSDGYCNSRIVQFSPSGKFITQWGEESSGSSPLPGQFTVPHSLALVPLLGQLCVADRENGRIQCFKTDTKEFVREIKHSSFGRNVFAISYIPGLLFAVNGKPHFGDQEPVQGFVMNFSNGEIIDIFKPVRKHFDMPHDIVASEDGTVYIGDAHTNTVWKFTLTEKLEHRSVKKAGIEVQEIKEAEAVVETKMENKPTSSELQKMQEKQKLIKEPGSGVPVVLITTLLVIPVVVLLAIAIFIRWKKSRAFGADSEHKLETSSGRVLGRFRGKGSGGLNLGNFFASRKGYSRKGFDRLSTEGSDQEKEDDGSESEEEYSAPLPALAPSSS

SEQ ID NO: 8407 - protein, 188 aa, synthetic construct
  source 1..188: note = Description of Artificial Sequence: Synthetic polypeptide
MSVDMNSQGSDSNEEDYDPNCEEEEEEEEDDPGDIEDYYVGVASDVEQQGADAFDPEEYQFTCLTYKESEGALNEHMTSLASVLKDGDPDTPKPVSFTVKETVCPRTTQQSPEDCDFKKDGLVKRCMGTVTLNQARGSFDISCDKDNKRFALLGDFFRKSKEKIGKEFKRIVQRIKDFLRNLVPRTES

SEQ ID NO: 8408 - protein, 926 aa, synthetic construct
  source 1..926: note = Description of Artificial Sequence: Synthetic polypeptide
MSRGAGALQRRTTTYLISLTLVKLESVPPPPPSPSAAAAGAAGARGSETGDPGSPRGAEEPGKKRHERLFHRQDALWISTSSAGTGGAEPPALSPAPASPARPVSPAPGRRLSLWAVPPGPPLSGGLSPDPKPGGAPTSSRRPLLSSPSWGGPEPEGRAGGGIPGSSSPHPGTGSRRLKVAPPPPAPKPCKTVTTSGAKAGGGKGAGSRLSWPESEGKPRVKGSKSSAGTGASVSAAATAAAAGGGGSTASTSGGVGAGAGARGKLSPRKGKSKTLDNSDLHPGPPAGSPPPLTLPPTPSPATAVTAASAQPPGPAPPITLEPPAPGLKRGREGGRASTRDRKMLKFISGIFTKSTGGPPGSGPLPGPPSLSSGSGSRELLGAELRASPKAVINSQEWTLSRSIPELRLGVLGDARSGKSSLIHRFLTGSYQVLEKTESEQYKKEMLVDGQTHLVLIREEAGAPDAKFSGWADAVIFVFSLEDENSFQAVSRLHGQLSSLRGEGRGGLALALVGTQDRISASSPRVVGDARARALCADMKRCSYYETCATYGLNVDRVFQEVAQKVVTLRKQQQLLAACKSLPSSPSHSAASTPVAGQASNGGHTSDYSSSLPSSPNVGHRELRAEAAAVAGLSTPGSLHRAAKRRTSLFANRRGSDSEKRSLDSRGETTGSGRAIPIKQSFLLKRSGNSLNKEWKKKYVTLSSNGFLLYHPSINDYIHSTHGKEMDLLRTTVKVPGKRPPRAISAFGPSASINGLVKDMSTVQMGEGLEATTPMPSPSPSPSSLQPPPDQTSKHLLKPDRNLARALSTDCTPSGDLSPLSREPPPSPMVKKQRRKKLTTPSKTEGSAGQAEDEGYSFSSVLYYGNEATLLIFDLLFFCVVDLACQNFILASFLTYLQQEIFRYIRNTVGQKNLASKTLVDQRFLI

SEQ ID NO: 8409 - protein, 95 aa, synthetic construct
  source 1..95: note = Description of Artificial Sequence: Synthetic polypeptide
MTHFNKGPSYGLSAEVKNKVLCNGPGTCVPICVSALLLGILGIKKVIIVYVESICRVETLSMSGKILFHLSDYFIVQWPALKEKYPKSVYLGRIV

SEQ ID NO: 8410 - protein, 65 aa, synthetic construct
  source 1..65: note = Description of Artificial Sequence: Synthetic polypeptide
MRRQPAKVAALLLGLLLEHIEGDDLHIQRNVQKLKDTVKKLGESGEIKAIGELDLLFMSLRNACI

SEQ ID NO: 8411 - protein, 340 aa, synthetic construct
  source 1..340: note = Description of Artificial Sequence: Synthetic polypeptide
MRPSGTAGAALLALLAALCPASRALEEKKADIAQRYRISKYPTLKLFRNGMMMKREYRGQRSVKALADYIRQQKSDPIQEIRDLAEITTLDRSKRNIIGYFEQKDSDNYRVFERVANILHDDCAFLSAFGDVSKPERYSGDNIIYKPPGHSAPDMVYLGAMTNFDVTYNWIQDKCVPLVREITFENGEELTEEGLPFLILFHMKEDTESLEIFQNEVARQLISEKGTINFLHADCDKFRHPLLHIQKTPADCPVIAIDSFRHMYVFGDFKDVLIPGKLKQFVFDLHSGKLHREFHHGPDPTDTAPGEQAQDVASSPPESSFQKLAPSEYRYTLLRDRDEL

SEQ ID NO: 8412 - protein, 612 aa, synthetic construct
  source 1..612: note = Description of Artificial Sequence: Synthetic polypeptide
MTDGKLSTSTNGVAFMGILDGRPGNPLQNLQHVNLKAPRLLSAPEYGPKLKLRALEDRHSLQSVDSGIPTLEIGNPEPVPCSAVHVRRKQSDSDLIPERAFQSACALPSCAPPAPSSTEREQSVRKSSTFPRTGYDSVKLYSPTSKALTRSDDVSVCSVSSLGTELSTTLSVSNEDILDLVVTSSSSAIVTLENDDDPQFTNVTLSSIKETRGLHQQDCVHEAEEGSKLKILGPFSNFFARNLLARKQSARLDKHNDLGWKLFGKAPLRENAQKDSKRIQKEYEDKAGRPSKPPSPKQNVRKNLDFEPLSTTALILEDRPAHPLFGRNVPLSSGSGFIMSEAGLIITNAHVVSSNSAAPGRQQLKVQLQNGDSYEATIKDIDKKSDIATIKIHPKKKLPVLLLGHSADLRPGEFVVAIGSPFALQNTVTTGIVSTAQREGRELGLRDSDMDYIQTDAIINYGNSGGPLVNLDGEVIGINTLKVTAGISFAIPSDRITRFLTEFQDKQIKDWKKRFIGIRMRTITPSLVDELKASNPDFPEVSSGIYVQEVAPNSPSQRGGIQDGDIIVKVNGRPLVDSSELQEAVLTESPLLLEVRRGNDDLLFSIAPEVVM

SEQ ID NO: 8413 - protein, 1775 aa, synthetic construct
  source 1..1775: note = Description of Artificial Sequence: Synthetic polypeptide
MRLLPRLLLLLLLVFPATVLFRGGPRGLLAVAQDLTEDEETVEDSIIEDEDDEAEVEEDEPTDLHTVREETMMVMTEDMPLEISYVPSTYLTEITHVSQALLEVEQLLNAPDLCAKDFEDLFKQEESLKNIKDSLQQSSGRIDIIHSKKTAALQSATPVERVKLQEALSQLDFQWEKVNKMYKDRQGRFDRSVEKWRRFHYDIKIFNQWLTEAEQFLRKTQIPENWEHAKYKWYLKELQDGIGQRQTVVRTLNATGEEIIQQSSKTDASILQEKLGSLNLRWQEVCKQLSDRKKRLEEQKNILSEFQRDLNEFVLWLEEADNIASIPLEPGKEQQLKEKLEQVKLLVEELPLRQGILKQLNETGGPVLVSAPISPEEQDKLENKLKQTNLQWIKVSRALPEKQGEIEAQIKDLGQLEKKLEDLEEQLNHLLLWLSPIRNQLEIYNQPNQEGPFDVKETEIAVQAKQPDVEEILSKGQHLYKEKPATQPVKRKLEDLSSEWKAVNRLLQELRAKQPDLAPGLTTIGASPTQTVTLVTQPVVTKETAISKLEMPSSLMLEVPALADFNRAWTELTDWLSLLDQVIKSQRVMVGDLEDINEMIIKQKATMQDLEQRRPQLEELITAAQNLKNKTSNQEARTIITDRIERIQNQWDEVQEHLQNRRQQLNEMLKDSTQWLEAKEEAEQVLGQARAKLESWKEGPYTVDAIQKKITETKQLAKDLRQWQTNVDVANDLALKLLRDYSADDTRKVHMITENINASWRSIHKRVSEREAALEETHRLLQQFPLDLEKFLAWLTEAETTANVLQDATRKERLLEDSKGVKELMKQWQDLQGEIEAHTDVYHNLDENSQKILRSLEGSDDAVLLQRRLDNMNFKWSELRKKSLNIRSHLEASSDQWKRLHLSLQELLVWLQLKDDELSRQAPIGGDFPAVQKQNDVHRAFKRELKTKEPVIMSTLETVRIFLTEQPLEGLEKLYQEPRELPPEERAQNVTRLLRKQAEEVNTEWEKLNLHSADWQRKIDETLERLRELQEATDELDLKLRQAEVIKGSWQPVGDLLIDSLQDHLEKVKALRGEIAPLKENVSHVNDLARQLTTLGIQLSPYNLSTLEDLNTRWKLLQVAVEDRVRQLHEAHRDFGPASQHFLSTSVQGPWERAISPNKVPYYINHETQTTCWDHPKMTELYQSLADLNNVRFSAYRTAMKLRRLQKALCLDLLSLSAACDALDQHNLKQNDQPMDILQIINCLTTIYDRLEQEHNNLVNVPLCVDMCLNWLLNVYDTGRTGRIRVLSFKTGIISLCKAHLEDKYRYLFKQVASSTGFCDQRRLGLLLHDSIQIPRQLGEVASFGGSNIEPSVRSCFQFANNKPEIEAALFLDWMRLEPQSMVWLPVLHRVAAAETAKHQAKCNICKECPIIGFRYRSLKHFNYDICQSCFFSGRVAKGHKMHYPMVEYCTPTTSGEDVRDFAKVLKNKFRTKRYFAKHPRMGYLPVQTVLEGDNMETPVTLINFWPVDSAPASSPQLSHDDTHSRIEHYASRLAEMENSNGSYLNDSISPNESIDDEHLLIQHYCQSLNQDSPLSQPRSPAQILISLESEERGELERILADLEEENRNLQAEYDRLKQQHEHKGLSPLPSPPEMMPTSPQSPRDAELIAEAKLLRQHKGRLEARMQILEDHNKQLESQLHRLRQLLEQPQAEAKVNGTTVSSPSTSLQRSDSSQPMLLRVVGSQTSDSMGEEDLLSPPQDTSTGLEEVMEQLNNSFPSSRGRNTPGKPMREDTM

SEQ ID NO: 8414 - protein, 735 aa, synthetic construct
  source 1..735: note = Description of Artificial Sequence: Synthetic polypeptide
MPLLGQTVRSASARTRRWSRRAAGDRPGAPSEARRPQLRGDHGIVDRVRGHWRIAGSCSTCWCPSALCSSTNGFMCTFPNMSLTLVHFVVTWLGLYICQKLDIFAPKSLPPSRLLLLALSFCGFVVFTNLSLQNNTIGTYQLAKAMTTPVIIAIQTFCYQKTFSTRIQLTLIPITLGVILNSYYDVKFNFLGMVFAALGVLVTSLYQVWVGAKQHELQVNSMQLLYYQAPMSSAMLLVAVPFFEPVFGEGGIFGPWSVSALFLCDEGAGISGDYIDRVDEPLSCSYVLTIRTPRLCPHPLLRPPPSAAPQAILCHPSLQPEEYMAYVQRQADSKQYGDKIIEELQDLGPQVWSETKSGVAPQKMAGASPTKDDSKDSDFWKMLNEPEDQAPGGEEVPAEEQDPSPEAADSASGAPNDFQNNVQVKVIRSPADLIRFIEELKGGTKKGKPNIGQEQPVDDAAEVPQREPEKERGDPERQREMEEEEDEDEDEDEDEDERQLLGEFEKELEGILLPSDRDRLRSEVKAGMERELENIIQETEKELDPDGLKKESERDRAMLALTSTLNKLIKRLEEKQSPELVKKHKKKRVVPKKPPPSPQPTEEDPEHRVRVRVTKLRLGGPNQDLTVLEMKRENPQLKQIEGLVKELLEREGLTAAGKIEIKIVRPWAEGTEEGARWLTDEDTRNLKEIFFNILVPGAEEAQKERQRQKELESNYRRVWGSPGGEGTGDLDEFDF

SEQ ID NO: 8415 - protein, 1017 aa, synthetic construct
  source 1..1017: note = Description of Artificial Sequence: Synthetic polypeptide
MVPEAWRSGLVSTGRVVGVLLLLGALNKASTVIHYEIPEEREKGFAVGNVVANLGLDLGSLSARRFRVVSGASRRFFEVNRETGEMFVNDRLDREELCGTLPSCTVTLELVVENPLELFSVEVVIQDINDNNPAFPTQEMKLEISEAVAPGTRFPLESAHDPDVGSNSLQTYELSRNEYFALRVQTREDSTKYAELVLERALDREREPSLQLVLTALDGGTPALSASLPIHIKVLDANDNAPVFNQSLYRARVLEDAPSGTRVVQVLATDLDEGPNGEIIYSFGSHNRAGVRQLFALDLVTGMLTIKGRLDFEDTKLHEIYIQAKDKGANPEGAHCKVLVEVVDVNDNAPEITVTSVYSPVPEDAPLGTVIALLSVTDLDAGENGLVTCEVPPGLPFSLTSSLKNYFTLKTSADLDRETVPEYNLSITARDAGTPSLSALTIVRVQVSDINDNPPQSSQSSYDVYIEENNLPGAPILNLSVWDPDAPQNARLSFFLLEQGAETGLVGRYFTINRDNGIVSSLVPLDYEDRREFELTAHISDGGTPVLATNISVNIFVTDRNDNAPQVLYPRPGGSSVEMLPRGTSAGHLVSRVVGWDADAGHNAWLSYSLLGSPNQSLFAIGLHTGQISTARPVQDTDSPRQTLTVLIKDNGEPSLSTTATLTVSVTEDSPEARAEFPSGSAPREQKKNLTFYLLLSLILVSVGFVVTVFGVIIFKVYKWKQSRDLYRAPVSSLYRTPGPSLHADAVRGGLMSPHLYHQVYLTTDSRRSDPLLKKPGAASPLASRQNTLRSCDPVFYRQVLGAESAPPGQEEQNRGKPNWEHLNEDLHVLITVEDAQNRAEIKLKRAVEEVKKLLVPAAEGEDSLKKMQLMELAILNGTYRDANIKSPALAFSLAATAQAAPRIITGPAPVLPPAALRTPTPAGPTIMPLIRQIQTAVMPNGTPHPTAAIVPPGPEAGLIYTPYEYPYTLAPATSILEYPIEPSGVLGAVATKVRRHDMRVHPYQRIVTADRAATGN

SEQ ID NO: 8416 - protein, 160 aa, synthetic construct
  source 1..160: note = Description of Artificial Sequence: Synthetic polypeptide
MADIEQYYMKPPEIVKEAEVPQAALGVPAQGTGDNGHTPVEEEVGGIPVPAPGLLQVTERRQPLSSVSSLEVHFDLLDLTELTDMSDQELAEVFADSDDENLNTESPAGLHPLPRAGYLRSPSWTRTRAEQSHEKQPLGDPERQATVLDTFLTVERPQED

SEQ ID NO: 8417 - protein, 1428 aa, synthetic construct
  source 1..1428: note = Description of Artificial Sequence: Synthetic polypeptide
MAAQVAPAAASSLGNPPPPPPSELKKAEQQQREEAGGEAAAAAAAERGEMKAAAGQESEGPAVGPPQPLGKELQDGAESNGGGGGGGAGSGGGPGAEPDLKNSNGNAGPRPALNNNLTEPPGGGGGGSSDGVGAPPHSAAAALPPPAYGFGQPYGRSPSAVAAAAAAVFHQQHGGQQSPGLAALQSGGGGGLEPYAGPQQNSHDHGFPNHQYNSYYPNRSAYPPPAPAYALSSPRGGTPGSGAAAAAGSKPPPSSSASASSSSSSFAQQRFGAMGGGGPSAAGGGTPQPTATPTLNQLLTSPSSARGYQGYPGGDYSGGPQDGGAGKGPADMASQCWGAAAAAAAAAAASGGAQQRSHHAPMSPGSSGGGGQPLARTPQPSSPMDQMGKMRPQPYGGTNPYSQQQGPPSGPQQGHGYPGQPYGSQTPQRYPMTMQGRAQSAMGGLSYTQQIPPYGQQGPSGYGQQGQTPYYNQQSPHPQQQQPPYSQQPPSQTPHAQPSYQQQPQSQPPQLQSSQPPYSQQPSQPPHQQSPAPYPSQQSTTQQHPQSQPPYSQPQAQSPYQQQQPQQPAPSTLSQQAAYPQPQSQQSQQTAYSQQRFPPPQELSQDSFGSQASSAPSMTSSKGGQEDMNLSLQSRPSSLPDLSGSIDDLPMGTEGALSPGVSTSGISSSQGEQSNPAQSPFSPHTSPHLPGIRGPSPSPVGSPASVAQSRSGPLSPAAVPGNQMPPRPPSGQSDSIMHPSMNQSSIAQDRGYMQRNPQMPQYSSPQPGSALSPRQPSGGQIHTGMGSYQQNSMGSYGPQGGQYGPQGGYPRQPNYNALPNANYPSAGMAGGINPMGAGGQMHGQPGIPPYGTLPPGRMSHASMGNRPYGPNMANMPPQVGSGMCPPPGGMNRKTQETAVAMHVAANSIQNRPPGYPNMNQGGMMGTGPPYGQGINSMAGMINPQGPPYSMGGTMANNSAGMAASPEMMGLGDVKLTPATKMNNKADGTPKTESKSKKSSSSTTTNEKITKLYELGGEPERKMWVDRYLAFTEEKAMGMTNLPAVGRKPLDLYRLYVSVKEIGGLTQMQALTSCECTICPDCFRQHFTIALKEKHITDMVCPACGRPDLTDDTQLLSYFSTLDIQLRESLEPDAYALFHKKLTEGVLMRDPKFLWCAQCSFGFIYEREQLEATCPQCHQTFCVRCKRQWEEQHRGRSCEDFQNWKRMNDPEYQAQGLAMYLQENGIDCPKCKFSYALARGGCMHFHCTQCRHQFCSGCYNAFYAKNKCPEPNCRVKKSLHGHHPRDCLFYLRDWTALRLQKLLQDNNVMFNTEPPAGARAVPGGGCRVIEQKEVPNGLRDEACGKETPAGYAGLCQAHYKEYLVSLINAHSLDPATLYEVEELETATERYLHVRPQPLAGEDPPAYQARLLQKLTEEVPLGQSIPRRRK

SEQ ID NO: 8418 - protein, 1017 aa, synthetic construct; identical to SEQ ID NO: 11
  source 1..1017: note = Description of Artificial Sequence: Synthetic polypeptide

SEQ ID NO: 8419 - protein, 502 aa, synthetic construct
  source 1..502: note = Description of Artificial Sequence: Synthetic polypeptide
MAAQVAPAAASSLGNPPPPPPSELKKAEQQQREEAGGEAAAAAAAERGEMKAAAGQESEGPAVGPPQPLGKELQDGAESNGGGGGGGAGSGGGPGAEPDLKNSNGNAGPRPALNNNLTEPPGGGGGGSSDGVGAPPHSAAAALPPPAYGFGQPYGRSPSAVAAAAAAVFHQQHGGQQSPGLAALQSGGGGGLEPYAGPQQNSHDHGFPNHQYNSYYPNRSAYPPPAPAYALSSPRGGTPGSGAAAAAGSKPPPSSSASASSSSSSFAQQRFGAMGGGGPSAAGGGTPQPTATPTLNQLLTSPSSARGYQGYPGGDYSGGPQDGGAGKGPADMASQCWGAAAAAAAAAAASGGAQQRSHHAPMSPGSSGGGGQPLARTPQVHLGSGIWVDEEKWHQLQVTQGDSKYTKNLAVMIWGTDVLKNRSVTGVATKKKKDAVPKPPLSPHKLSIVRECLYDRIAQETVDETEIAQRLSKVNKYICEKIMDINKSCKNEERREAKYNLQ

SEQ ID NO: 8420 - protein, 773 aa, synthetic construct
  source 1..773: note = Description of Artificial Sequence: Synthetic polypeptide
MLLSLPALHLQTSEHHPFFQLPHRRLGPWCSPTGSPAPLSCETGCGEGSWILVCRLLVPTQVSLLSMEEDIDTRKINNSFLRDHSYATEADIISTVEFNHTGELLATGDKGGRVVIFQREQESKNQVHRRGEYNVYSTFQSHEPEFDYLKSLEIEEKINKIRWLPQQNAAYFLLSTNDKTVKLWKVSERDKRPEGYNLKDEEGRLRDPATITTLRVPVLRPMDLMVEATPRRVFANAHTYHINSISVNSDYETYMSADDLRINLWNFEITNQSFNIVDIKPANMEELTEVITAAEFHPHHCNTFVYSSSKGTIRLCDMRASALCDRHTKSGEMLSVAEHFLEQQMHPTVVISAYRKALDDMISTLKKISIPVDISDSDMMLNIINSSITTKAISRWSSLACNIALDAVKMVQFEENGRKEIDIKKYARVEKIPGGIIEDSCVLRGVMINKDVTHPRMRRYIKNPRIVLLDSSLEYKKGESQTDIEITREEDFTRILQMEEEYIQQLCEDIIQLKPDVVITEKGISDLAQHYLMRANITAIRRVRKTDNNRIARACGARIVSRPEELREDDVGTGAGLLEIKKIGDEYFTFITDCKDPKACTILLRGASKEILSEVERNLQDAMQVCRNVLLDPQLVPGGGASEMAVAHALTEKSKAMTGVEQWPYRAVAQALEVIPRTLIQNCGASTIRLLTSLRAKHTQENCETWGVNGETGTLVDMKELGIWEPLAVKLQTYKTAVETAVLLLRIDDIVSGHKKKGDDQSRQGGAPDAGQE

SEQ ID NO: 8421 - protein, 1428 aa, synthetic construct; identical to SEQ ID NO: 8417
  source 1..1428: note = Description of Artificial Sequence: Synthetic polypeptide

SEQ ID NO: 8422 - protein, 279 aa, synthetic construct
  source 1..279: note = Description of Artificial Sequence: Synthetic polypeptide
MAELDPFGAPAGAPGGPALGNGVAGAGEEDPAAAFLAQQESEIAGIENDEAFAILDGGAPGPQPHGEPPGGPDAVDGVMNGEYYQESNGPTDSYAAISQVDRLQSEPESIRKWREEQMERLEALDANSRKQEAEWKEKAIKELEEWYARQDEQLQKTKANNRTILLSVISLLNEPNTFSPANVDASVMFRKWRDSKGKDKEYAEIIRKQVSATKAEAEKDGVKVPTTLAEYCIKTKVPSNDNSSDLLYDDLYDDDIDDEDEEEEDADCYDDDDSGNEES

SEQ ID NO: 8423 - protein, 186 aa, synthetic construct
  source 1..186: note = Description of Artificial Sequence: Synthetic polypeptide
MSRPVRFMERNPLTNAIIRTTTALTIFKAGVKFNVIPPVAQATVNFRIHPGQTVQEVLELTKNIVADNRVQFHVLSAFDPLPVSPSDDKALGYQLLRQTVQSVFPEVNITAPVTSIGNTDSRFFTNLTTGIYRFYPIYIQPEDFKRIHGVNEKISVQAYETQVKFIFELIQNADTDQEPVSHLHKL

SEQ ID NO: 8424 - protein, 940 aa, synthetic construct
  source 1..940: note = Description of Artificial Sequence: Synthetic polypeptide
MRVAAATAAAGAGPAMAVWTRATKAGLVELLLRERWVRVVAELSGESLSLTGDAAAAELEPALGPAAAAFNGLPNGGGAGDSLPGSPSRGLGPPSPPAPPRGPAGEAGASPPVRRVRVVKQEAGGLGISIKGGRENRMPILISKIFPGLAADQSRALRLGDAILSVNGTDLRQATHDQAVQALKRAGKEVLLEVKFIREVTPYIKKPSLVSDLPWEGAAPQSPSFSGSEDSGSPKHQNSTKDRKIIPLKMCFAARNLSMPDLENRLIELHSPDSRNTLILRCKDTATAHSWFVAIHTNIMALLPQVLAELNAMLGATSTAGGSKEVKHIAWLAEQAKLDGGRQQWRPVLMAVTEKDLLLYDCMPWTRDAWASPCHSYPLVATRLVHSGSGCRSPSLGSDLTFATRTGSRQGIEMHLFRVETHRDLSSWTRILVQGCHAAAELIKEVSLGCMLNGQEVRLTIHYENGFTISRENGGSSSILYRYPFERLKMSADDGIRNLYLDFGGPEGELKAIDLVTKATEEDKAKNYEEALRLYQHAVEYFLHAIKYEAHSDKAKESIRAKCVQYLDRAEKLKDYLRSKEKHGKKPVKENQSEGKGSDSDSEGDNPEKKKLQEQLMGAVVMEKPNIRWNDVAGLEGAKEALKEAVILPIKFPHLFTGKRTPWRGILLFGPPGTGKSYLAKAVATEANNSTFFSVSSSDLMSKWLGESEKLVKNLFELARQHKPSIIFIDEVDSLCGSRNENESEAARRIKTEFLVQMQGVGNNNDGTLVLGATNIPWVLDSAIRRRFEKRIYIPLPEEAARAQMFRLHLGSTPHNLTDANIHELARKTEGYSGADISIIVRDSLMQPVRKVQSATHFKKVCGPSRTNPSMMIDDLLTPCSPGDPGAMEMTWMDVPGDKLLEPVVCMSDMLRSLATTRPTVNADDLLKVKKFSEDFGQES

SEQ ID NO: 8425 - protein, 396 aa, synthetic construct
  source 1..396: note = Description of Artificial Sequence: Synthetic polypeptide
MKTPADTGDSGKVTTVVATLGQGPERSQEVAYTDIKVIGNGSFGVVYQARLAETRELVAIKKVLQDKRFKNRELQIMRKLDHCNIVRLRYFFYSSGEKKDELYLNLVLEYVPETVYRVARHFTKAKLTIPILYVKVYMYQLFRSLAYIHSQGVCHRDIKPQNLLVDPDTAVLKLCDFGSAKQLVRGEPNVSYICSRYYRAPELIFGATDYTSSIDVWSAGCVLAELLLGQPIFPGDSGVDQLVEIIKVLGTPTREQIREMNPNYTEFKFPQIKAHPWTKVFKSRTPPEAIALCSSLLEYTPSSRLSPLEACAHSFFDELRCLGTQLPNNRPLPPLFNFSAGELSIQPSLNAILIPPHLRSPAGTTTLTPSSQALTETPTSSDWQSTDATPTLTNSS

SEQ ID NO: 8426 - protein, 1044 aa, synthetic construct
  source 1..1044: note = Description of Artificial Sequence: Synthetic polypeptide
MGMARGSLTRVPGVMGEGTQGPELSLDPDPCSPQSTPGLMKGNKLEEQDPRPLQPIPGLMEGNKLEEQDSSPPQSTPGLMKGNKREEQGLGPEPAAPQQPTAEEEALIEFHRSYRELFEFFCNNTTIHGAIRLVCSQHNRMKTAFWAVLWLCTFGMMYWQFGLLFGEYFSYPVSLNINLNSDKLVFPAVTICTLNPYRYPEIKEELEELDRITEQTLFDLYKYSSFTTLVAGSRSRRDLRGTLPHPLQRLRVPPPPHGARRARSVASSLRDNNPQVDWKDWKIGFQLCNQNKSDCFYQTYSSGVDAVREWYRFHYINILSRLPETLPSLEEDTLGNFIFACRFNQVSCNQANYSHFHHPMYGNCYTFNDKNNSNLWMSSMPGINNGLSLMLRAEQNDFIPLLSTVTGARVMVHGQDEPAFMDDGGFNLRPGVETSISMRKETLDRLGGDYGDCTKNGSDVPVENLYPSKYTQQVCIHSCFQESMIKECGCAYIFYPRPQNVEYCDYRKHSSWGYCYYKLQVDFSSDHLGCFTKCRKPCSVTSYQLSAGYSRWPSVTSQEWVFQMLSRQNNYTVNNKRNGVAKVNIFFKELNYKTNSESPSVTVLLELLVGIYPSGVIGLVPHLGDREKRDSVCPQGKYIHPQNNSICCTKCHKGTYLYNDCPGPGQDTDCRECESGSFTASENHLRHCLSCSKCRKEMGQVEISSCTVDRDTVCGCRKNQYRHYWSENLFQCFNCSLCLNGTVHLSCQEKQNTVCTCHAGFFLRENECVSCSNCKKSLECTKLCLPQIENVKGTEDSGTTVLLPLVIFFGLCLLSLLFIGLMYRYQRWKSKLYSIVCGKSTPEKEGELEGTTTKPLAPNPSFSPTPGFTPTLGFSPVPSSTFTSSSTYTPGDCPNFAAPRREVAPPYQGADPILATALASDPIPNPLQKWEDSAHKPQSLDTDDPATLYAVVENVPPLRWKEFVRRLGLSDHEIDRLELQNGRCLREAQYSMLATWRRRTPRREATLELLGRVLRDMDLLGCLEDIEEALCGPAALPPAPSLLR

SEQ ID NO: 8427 - protein, 683 aa, synthetic construct
  source 1..683: note = Description of Artificial Sequence: Synthetic polypeptide
MVRSRQMCNTNMSVPTDGAVTTSQIPASEQETLVRPKPLLLKLLKSVGAQKDTYTMKEVLFYLGQYIMTKRLYDEKQQHIVYCSNDLLGDLFGVPSFSVKEHRKIYTMIYRNLVVVNQQESSDSGTSVSENRCHLEGGSDQKDLVQELQEEKPSSSHLVSRPSTSSRRRAISETEENSDELSGERQRKRHKSDSISLSFDESLALCVIREICCERSSSSESTGTPSNPDLDAGVSEHSGDWLDQDSVSDQFSVEFEVESLDSEDYSLSEEGQELSDEDDEVYQVTVYQAGESDTDSFEEDPEISLAESEGVSCHYWSLFDGHAGSGAAVVASRLLQHHITEQLQDIVDILKNSAVLPPTCLGEEPENTPANSRTLTRAASLRGGVGAPGSPSTPPTRFFTEKKIPHECLVIGALESAFKEMDLQIERERSSYNISGGCTALIVICLLGKLYVANAGDSRAIIIRNGEIIPMSSEFTPETERQRLQYLAFMQPHLLGNEFTHLEFPRRVQRKELGKKMLYRDFNMTGWAYKTIEDEDLKFPLIYGEGKKARVMATIGVTRGLGDHDLKVHDSNIYIKPFLSSAPEVRIYDLSKYDHGSDDVLILATDGLWDVLSNEEVAEAITQFLPNCDPDDPHRYTLAAQDLVMRARGVLKDRGWRISNDRLGSGDDISVYVIPLIHGNKLS

SEQ ID NO: 8428 - protein, 2135 aa, synthetic construct
  source 1..2135: note = Description of Artificial Sequence: Synthetic polypeptide
MDPRNTAMLGLGSDSEGFSRKSPSAISTGTLVSKREVELEKNTKEEEDLRKRNRERNIEAGKDDGLTDAQQQFSVKETNFSEGNLKLKIGLQAKRTKKPPKNLENYVCRPAIKTTIKHPRKALKSGKMTDEKNEHCPSKRDPSKLYKKADDVAAIECQSEEVIRLHSQGENNPLSKKLSPVHSEMADYINATPSTLLGSRDPDLKDRALLNGGTSVTEKLAQLIATCPPSKSSKTKPKKLGTGTTAGLVSKDLIRKAGVGSVAGIIHKDLIKKPTISTAVGLVTKDPGKKPVFNAAVGLVNKDSVKKLGTGTTAVFINKNLGKKPGTITTVGLLSKDSGKKLGIGIVPGLVHKESGKKLGLGTVVGLVNKDLGKKLGSTVGLVAKDCAKKIVASSAMGLVNKDIGKKLMSCPLAGLISKDAINLKAEALLPTQEPLKASCSTNINNQESQELSESLKDSATSKTFEKNVVRQNKESILEKFSVRKEIINLEKEMFNEGTCIQQDSFSSSEKGSYETSKHEKQPPVYCTSPDFKMGGASDVSTAKSPFSAVGESNLPSPSPTVSVNPLTRSPPETSSQLAPNPLLLSSTTELIEEISESVGKNQFTSESTHLNVGHRSVGHSISIECKGIDKEVNDSKTTHIDIPRISSSLGKKPSLTSESSIHTITPSVVNFTSLFSNKPFLKLGAVSASDKHCQVAESLSTSLQSKPLKKRKGRKPRWTKVVARSTCRSPKGLELERSELFKNVSCSSLSNSNSEPAKFMKNIGPPSFVDHDFLKRRLPKLSKSTAPSLALLADSEKPSHKSFATHKLSSSMCVSSDLLSDIYKPKRGRPKSKEMPQLEGPPKRTLKIPASKVFSLQSKEEQEPPILQPEIEIPSFKQGLSVSPFPKKRGRPKRQMRSPVKMKPPVLSVAPFVATESPSKLESESDNHRSSSDFFESEDQLQDPDDLDDSHRPSVCSMSDLEMEPDKKITKRNNGQLMKTIIRKINKMKTLKRKKLLNQILSSSVESSNKGKVQSKLHNTVSSLAATFGSKLGQQINVSKKGTIYIGKRRGRKPKTVLNGILSGSPTSLAVLEQTAQQAAGSALGQILPPLLPSSASSSEILPSPICSQSSGTSGGQSPVSSDAGFVEPSSVPYLHLHSRQGSMIQTLAMKKASKGRRRLSPPTLLPNSPSHLSELTSLKEATPSPISESHSDETIPSDSGIGTDNNSTSDRAEKFCGQKKRRHSFEHVSLIPPETSTVLSSLKEKHKHKCKRRNHDYLSYDKMKRQKRKRKKKYPQLRNRQDPDFIAELEELISRLSEIRITHRSHHFIPRDLLPTIFRINFNSFYTHPSFPLDPLHYIRKPDLKKKRGRPPKMREAMAEMPFMHSLSFPLSSTGFYPSYGMPYSPSPLTAAPIGLGYYGRYPPTLYPPPPSPSFTTPLPPPSYMHAGHLLLNPAKYHKKKHKLLRQEAFLTTSRTPLLSMSTYPSVPPEMAYGWMVEHKHRHRHKHREHRSSEQPQVSMDTGSSRSVLESLKRYRFGKDAVGERYKHKEKHRCHMSCPHLSPSKSLINREEQWVHREPSESSPLALGLQTPLQIDCSESSPSLSLGGFTPNSEPASSDEHTNLFTSAIGSCRVSNPNSSGRKKLTDSPGLFSAQDTSLNRLHRKESLPSNERAVQTLAGSQPTSDKPSQRPSESTNCSPTRKRSSSESTSSTVNGVPSRSPRLVASGDDSVDSLLQRMVQNEDQEPMEKSIDAVIATASAPPSSSPGRSHSKDRTLGKPDSLLVPAVTSDSCNNSISLLSEKLTSSCSPHHIKRSVVEAMQRQARKMCNYDKILATKKNLDHVNKILKAKKLQRQARTGNNFVKRRPGRPRKCPLQAVVSMQAFQAAQFVNPELNRDEEGAALHLSPDTVTDVIEAVVQSVNLNPEHKKGLKRKGWLLEEQTRKKQKPLPEEEEQENNKSFNEAPVEIPSPSETPAKPSEPESTLQPVLSLIPREKKPPRPPKKKYQKAGLYSDVYKTTDFSPGAGGFCTTLPPSFLRVDDRATSSTTDSSRAPSSPRPPGSTSHCGISTRCTERCLCVLPLRTSQVPDVMAPQHDQEKFHDLAYSCLGKSFSMSNQDLYGYSTSSLALGLAWLSWETKKKNVLHLVGLDSL

SEQ ID NO: 8429 - protein, 511 aa, synthetic construct
  source 1..511: note = Description of Artificial Sequence: Synthetic polypeptide
MSGGKKKSSFQITSVTTDYEGPGSPGASDPPTPQPPTGPPPRLPNGEPSPDPGGKGTPRNGSPPPGAPSSRFRVVKLPHGLGEPYRRGRWTCVDVYERDLEPHSFGGLLEGIRGASGGAGGRSLDSRLELASLGLGAPTPPSGLSQGPTSWLRPPPTSPGPQARSFTGGLGQLVVPSKAKAEKPPLSASSPQQRPPEPETGESAGTSRAATPLPSLRVEAEAGGSGARTPPLSRRKAVDMRLRMELGAPEEMGQVPPLDSRPSSPALYFTHDASLVHKSPDPFGAVAAQKFSLAHSMLAISGHLDSDDDSGSGSLVGIDNKIEQAMVFFWRQKIKPTISGHPDSKKHSLKKMEKTLQVVETLRLVELPKEAKPKLGESPELADPCVLAKTTEETEVELGQQGQSLLQLPRTAVKSVSTLMVSALQSGWQMCSWKSSVSSASVSSQVRTQSPLKTPEAELLWEVYLVLWAVRKHLRRLYRRQERHRRHHVRCHAAPRPNPAQSLKLDAQSPL

SEQ ID NO: 8430 - protein, 611 aa, synthetic construct
  source 1..611: note = Description of Artificial Sequence: Synthetic polypeptide
MALRRLGAALLLLPLLAAVEGAGQDVGRSCILVSIAGKNVMLDCGMHMGFNDDRRFPDFSYITQNGRLTDFLDCVIISHFHLDHCGALPYFSEMVGYDGPIYMTHPTQAICPILLEDYRKIAVDKKGEANFFTSQMIKDCMKKVVAVHLHQTVQVDDELEIKAYYAGHVLGAAMFQIKVGSESVVYTGDYNMTPDRHLGAAWIDKCRPNLLITESTYATTIRDSKRCRERDFLKKVHETVERGGKVLIPVFALGRAQELCILLETFWERMNLKVPIYFSTGLTEKANHYYKLFIPWTNQKIRKTFVQRNMFEFKHIKAFDRAFADNPGPMVVFATPGMLHAGQSLQIFRKWAGNEKNMVIMPGYCVQGTVGHKILSGQRKLEMEGRQVLEVKMQVEYMSFSAHADAKGIMQLVGQAEPESVLLVHGEAKKMEFLKQKIEQELRVNCYMPANGETVTLPTSPSIPVGISLGLLKREMAQGLLPEAKKPRLLHGTLIMKDSNFRLVSSEQALKELGLAEHQLRFTCRVHLHDTRKEQETALRVYSHLKSVLKDHCVQHLPDGSVTVESVLLQAAAPSEDPGTKVLLVSWTYQDEELGSFLTSLLKKGLPQAPS

SEQ ID NO: 8431 - protein, 265 aa, synthetic construct
  source 1..265: note = Description of Artificial Sequence: Synthetic polypeptide
MNQPESANDPEPLCAVCGQAHSLEENHFYSYPEEVDDDLICHICLQALLDPLDTPCGHTYCTLCLTNFLVEKDFCPMDRKPLVLQHCKKSSILVNKLLNKLLVTCPFREHCTQVLQRCDLEHHFQTSCKGASHYGLTKDRKRRSQDGCPDGCASLTATAPSPEVSAAATISLMTDEPGLDNPAYVSSAEDGQPAISPVDSGRSNRTRARPFERSTIRSRSFKKINRALSVLRRTKSGSAVANHADQGRENSENTTAPEVWKHMLL

SEQ ID NO: 8432 - protein, 1033 aa, synthetic construct
  source 1..1033: note = Description of Artificial Sequence: Synthetic polypeptide
MWLKVGGLLRGTGGQLGQTVGWPCGALGPGPHRWGPCGGSWAQKFYQDGPGRGLGEEDIRRAREARPRKTPRPQLSDRSRERKVPASRISRLANFGGLAVGLGLGVLAEMAKKSMPGGRLQSEGGSGLDSSPFLSEANAERIVQTLCTVRGAALKVGQMLSIQDNSFISPQLQHIFERVRQSADFMPRWQMLRVLEEELGRDWQAKVASLEEVPFAAASIGQVHQGLLRDGTEVAVKIQYPGIAQSIQSDVQNLLAVLKMSAALPAGLFAEQSLQALQQELAWECDYRREAACAQNFRQLLANDPFFRVPAVVKELCTTRVLGMELAGGVPLDQCQGLSQDLRNQICFQLLTLCLRELFEFRFMQTDPNWANFLYDASSHQVTLLDFGASREFGTEFTDHYIEVVKAAADGDRDCVLQKSRDLKFLTGFETKGGPRRPERHLPPAPCGAPGPPETCRTEPDGAGTMNKLRQSLRRRKPAYVPEASRPHQWQADEDAVRKGTCSFPVRYLGHVEVEESRGMHVCEDAVKKLKAMGRKSVKSVLWVSADGLRVVDDKTKDLLVDQTIEKVSFCAPDRNLDKAFSYICRDGTTRRWICHCFLALKDSGERLSHAVGCAFAACLERKQRREKECGVTAAFDASRTSFAREGSFRLSGGGRPAEREAPDKKKAEAAAAPTVAPGPAQPGHVSPTPATTSPGEKGEAGTPVAAGTTAAAIPRRHAPLEQLVRQGSFRGFPALSQKNSPFKRQLSLRLNELPSTLQRRTDFQVKGTVPEMEPPGAGDSDSINALCTQISSSFASAGAPAPGPPPATTGTSAWGEPSVPPAAAFQPGHKRTPSEAERWLEEVSQVAKAQQQQQQQQQQQQQQQQQQQQAASVAPVPTMPPALQPFPAPVGPFDAAPAQVAVFLPPPHMQPPFVPAYPGLGYPPMPRVPVVGITPSQMVANAFCSAAQLQPQPATLLGKAGAFPPPAIPSAPGSQARPRPNGAPWPPEPAPAPAPELDPFEAQWAALEGKATVEKPSNPFSGDLQKTFEIEL

SEQ ID NO: 8433 - protein, 861 aa, synthetic construct
  source 1..861: note = Description of Artificial Sequence: Synthetic polypeptide
MASCPDSDNSWVLAGSESLPVETLGPASRMDPESERALQAPHSPSKTDGKELAGTMDGEGTLFQTESPQSGSILTEETEVKGTLEGDVCGVEPPGPGDTVVQGDLQETTVVTGLGPDTQDLEGQSPPQSLPSTPKAAWIREEGRCSSSDDDTDVDMEGLRRRRGREAGPPQPMVPLAVENQAGGEGAGGELGISLNMCLLGALVLLGLGVLLFSGGLSESETGPMEEVERQVLPDPEVLEAVGDRQDGLREQLQAPVPPDSVPSLQNMGLLLDKLAKENQDIRLLQAQLQAQKEELQSLMHQPKGLEEENAQLRGALQQGEAFQRALESELQQLRARLQGLEADCVRGPDGVCLSGGRGPQGDKAIREQGPREQEPELSFLKQKEQLEAEAQALRQELERQRRLLGSVQQDLERSLQDASRGDPAHAGLAELGHRLAQKLQGLENWGQDPGVSANASKAWHQKSHFQNSREWSGKEKWWDGQRDRKAEHWKHKKEESGRERKKNWGGQEDREPAGRWKEGRPRVEESGSKKEGKRQGPKEPPRKSGSFHSSGEKQKQPRWREGTKDSHDPLPSWAELLRPKYRAPQGCSGVDECARQEGLTFFGTELAPVRQQELASLLRTYLARLPWAGQLTKELPLSPAFFGEDGIFRHDRLRFRDFVDALEDSLEEVAVQQTGDDDEVDDFEDFIFSHFFGDKALKKRLGADVCAVLRLSGPLKEQYAQEHGLNFQRLLDTSTYKEAFRKDMIRWGEEKRQADPGFFCRKIVEGISQPIWLVSDTRRVSDIQWFREAYGAVTQTVRVVALEQSRQQRGWVFTPGVDDAESECGLDNFGDFDWVIENHGVEQRLEEQLENLIEFIRSRL

SEQ ID NO: 8434 - protein, 1036 aa, synthetic construct
  source 1..1036: note = Description of Artificial Sequence: Synthetic polypeptide
MEARSMLVPPQASVCFEDVAMAFTQEEWEQLDLAQRTLYREVTLETWEHIVSLGLFLSKSDVISQLEQEEDLCRAEQEAPRGKSKEAEIKRINKELANIRSKFKGDKALDGYSKKKYVCKLLFIFLLGHDIDFGHMEAVNLLSSNKYTEKQIGYLFISVLVNSNSELIRLINNAIKNDLASRNPTFMCLALHCIANVGSREMGEAFAADIPRILVAGDSMDSVKQSAALCLLRLYKASPDLVPMGEWTARVVHLLNDQHMGVVTAAVSLITCLCKKNPDDFKTCVSLAVSRLSRIVSSASTDLQDYTYYFVPAPWLSVKLLRLLQCYPPPEDAAVKGRLVECLETVLNKAQEPPKSKKVQHSNAKNAILFETISLIIHYDSEPNLLVRACNQLGQFLQHRETNLRYLALESMCTLASSEFSHEAVKTHIDTVINALKTERDVSVRQRAADLLYAMCDRSNAKQIVSEMLRYLETADYAIREEIVLKVAILAEKYAVDYSWYVDTILNLIRIAGDYVSEEVWYRVLQIVTNRDDVQGYAAKTVFEALQAPACHENMVKVGGYILGEFGNLIAGDPRSSPPVQFSLLHSKFHLCSVATRALLLSTYIKFINLFPETKATIQGVLRAGSQLRNADVELQQRAVEYLTLSSVASTDVLATVLEEMPPFPERESSILAKLKRKKGPGAGSALDDGRRDPSSNDINGGMEPTPSTVSTPSPSADLLGLRAAPPPAAPPASAGAGNLLVDVFDGPAAQPSLGPTPEEAFLSELEPPAPESPMALLADPAPAADPGPEDIGPPIPEADELLNKFVCKNNGVLFENQLLQIGVKSEFRQNLGRMYLFYGNKTSVQFQNFSPTVVHPGDLQTHLAVQTKRVAAQVDGGAQVQQVLNIECLRDFLTPPLLSVRFRYGGAPQALTLKLPVTINKFFQPTEMAAQDFFQRWKQLSLPQQEAQKIFKANHPMDAEVTKAKLLGFGSALLDNVDPNPENFVGAGIIQTKALQVGCLLRLEPNAQAQMYRLTLRTSKEPVSRHLCELLAQQF

SEQ ID NO: 8435 - protein, 562 aa, synthetic construct
  source 1..562: note = Description of Artificial Sequence: Synthetic polypeptide
MASESGKLWGGRFVGAVDPIMEKFNASIAYDRHLWEVDVQGSKAYSRGLEKAGLLTKAEMDQILHGLDKVAEEWAQGTFKLNSNDEDIHTANERRLKELIGATAGKLHTGRSRNDQVVTDLRLWMRQTCSTLSGLLWELIRTMVDRAEAERDVLFPGYTHLQRAQPIRWSHWILSHAVALTRDSERLLEVRKRINVLPLGSGAIAGNPLGVDRELLRAELNFGAITLNSMDATSERDFVAEFLFWASLCMTHLSRMAEDLILYCTKEFSFVQLSDAYSTGSSLMPQKKNPDSLELIRSKAGRVFGRCAGLLMTLKGLPSTYNKDLQEDKEAVFEVSDTMSAVLQVATGVISTLQIHQENMGQALSPDMLATDLAYYLVRKGMPFRQAHEASGKAVFMAETKGVALNQLSLQELQTIRKDANSALLSNYEVFQLLTDLKEQRKESGKNKHSSGQQNLNTITYETLKYISKTPCRHQSPEIVREFLTALKSHKLTKAEKLQLLNHRPVTAVEIQLMVEESEERLTEEQIEALLHTVTSILPAEPEAEQKKNTNSNVAMDEEDPA

SEQ ID NO: 8436 - protein, 1017 aa, synthetic construct; identical to SEQ ID NO: 11
  source 1..1017: note = Description of Artificial Sequence: Synthetic polypeptide

SEQ ID NO: 8437 - protein, 482 aa, synthetic construct
  source 1..482: note = Description of Artificial Sequence: Synthetic polypeptide
MGETMSKRLKLHLGGEAEMEERAFVNPFPDYEAAAGALLASGAAEETGCVRPPATTDEPGLPFHQDGKQKENNIRCLTTIGHFGFECLPNQLVSRSIRQGFTFNILCVGETGIGKSTLIDTLFNTNLKDNKSSHFYSNVGLQIQTYELQESNVQLKLTVVETVGYGDQIDKEASYQPIVDYIDAQFEAYLQEELKIKRSLFEYHDSRVHVCLYFISPTGHSLKSLDLLTMKNLDSKVNIIPLIAKADTISKNDLQTFKNKIMSELISNGIQIYQLPTDEETAAQANSSVSGLLPFAVVGSTDEVKVGKRMVRGRHYPWGVLQVENENHCDFVKLRDMLLCTNMENLKEKTHTQHYECYRYQKLQKMGFTDVGPNNQPVSFQEIFEAKRQEFYDQCQREEEELKQRFMQRVKEKEATFKEAEKELQDKFEHLKMIQQEEIRKLEEEKKQLEGEIIDFYKMKAASEALQTQLSTDTKKDKHRKK

SEQ ID NO: 8438 - protein, 190 aa, synthetic construct
  source 1..190: note = Description of Artificial Sequence: Synthetic polypeptide
MAAPLVLVLVVAVTVRAALFRSSLAEFISERVEVVSPLSSWKRVVEGLSLLDLGVSPYSGAVFHETPLIIYLFHFLIDYAELVFMITDALTAIALYFAIQDFNKVVFKKQKLLLELDQYAPDVAELIRTPMEMRYIPLKVALFYLLNPYTILSCVAKSTCAINNTLIAFFILTTIKDITSAVQSKRRKSK

SEQ ID NO: 8439 - protein, 1136 aa, synthetic construct
  source 1..1136: note = Description of Artificial Sequence: Synthetic polypeptide
MRPSGTAGAALLALLAALCPASRALEEKKVCQGTSNKLTQLGTFEDHFLSLQRMFNNCEVVLGNLEITYVQRNYDLSFLKTIQEVAGYVLIALNTVERIPLENLQIIRGNMYYENSYALAVLSNYDANKTGLKELPMRNLQEILHGAVRFSNNPALCNVESIQWRDIVSSDFLSNMSMDFQNHLGSCQKCDPSCPNGSCWGAGEENCQKLTKIICAQQCSGRCRGKSPSDCCHNQCAAGCTGPRESDCLVCRKFRDEATCKDTCPPLMLYNPTTYQMDVNPEGKYSFGATCVKKCPRNYVVTDHGSCVRACGADSYEMEEDGVRKCKKCEGPCRKVCNGIGIGEFKDSLSINATNIKHFKNCTSISGDLHILPVAFRGDSFTHTPPLDPQELDILKTVKEITGFLLIQAWPENRTDLHAFENLEIIRGRTKQHGQFSLAVVSLNITSLGLRSLKEISDGDVIISGNKNLCYANTINWKKLFGTSGQKTKIISNRGENSCKATGQVCHALCSPEGCWGPEPRDCVSCRNVSRGRECVDKCNLLEGEPREFVENSECIQCHPECLPQAMNITCTGRGPDNCIQCAHYIDGPHCVKTCPAGVMGENNTLVWKYADAGHVCHLCHPNCTYGCTGPGLEGCPTNGPKIPSIATGMVGALLLLLVVALGIGLFMRRRHIVRKRTLRRLLQERELVEPLTPSGEAPNQALLRILKETEFKKIKVLGSGAFGTVYKGLWIPEGEKVKIPVAIKELREATSPKANKEILDEAYVMASVDNPHVCRLLGICLTSTVQLITQLMPFGCLLDYVREHKDNIGSQYLLNWCVQIAKGMNYLEDRRLVHRDLAARNVLVKTPQHVKITDFGLAKLLGAEEKEYHAEGGKVPIKWMALESILHRIYTHQSDVWSYGVTVWELMTFGSKPYDGIPASEISSILEKGERLPQPPICTIDVYMIMVKCWMIDADSRPKFRELIIEFSKMARDPQRYLVIQCTEAKKHCWYFEGLYPTYYICRSYEDCCGSRCCVRALSIQRLWYFWFLLMMGVLFCCGAGFFIRRRMYPPPLIEEPAFNVSYTRQPPNPGPGAQQPGPPYYTDPGGPGMNPVGNSMAMAFQVPPNSPQGSVACPPPPAYCNTPPPPYEQVVKAK

SEQ ID NO: 8440 - protein, 513 aa, synthetic construct
  source 1..513: note = Description of Artificial Sequence: Synthetic polypeptide
MAEAPPVSGTFKFNTDAAEFIPQEKKNSGLNCGTQRRLDSNRIGRRNYSSPPPCHLSRQVPYDEISAVHQHSYHPSGSKPKSQQTSFQSSPCNKSPKSHGLQNQPWQKLRNEKHHIRVKKAQSLAEQTSDTAGLESSTRSESGTDLREHSPSESEKEVVGADPRGAKPKKATQFVYSYGRGPKVKGKLKCEWSNRTTPKPEDAGPESTKPVGVFHPDSSEASSRKGVLDGYGARRNEQRRYPQKRPPWEVEGARPRPGRNPPKQEGHRHTNAGHRNNMGPIPKDDLNERPAKSTCDSENLAVINKSSRRVDQEKCTVRRQDPQVVSPFSRGKQNHVLKNVETHTADKCSPNYLGSDWYNTWRMEPYNSSCCNKYTTYLPRLPKEARMETAVRGMPLECPPRPERLNAYEREVMVNMLNSLSRNQQLPRITPRCGCVDPLPGRLPFHGYESACSGRHYCLRGMDYYASGAPCTDRRLRPWCREQPTMCTSLRAPARNAVCCYNSPAVILPISEP

SEQ ID NO: 8441 - protein, 1058 aa, synthetic construct
  source 1..1058: note = Description of Artificial Sequence: Synthetic polypeptide
MAAETLLSSLLGLLLLGLLLPASLTGGVGSLNLEELSEMRYGIEILPLPVMGGQSQSSDVVIVSSKYKQRYECRLPAGAIHFQREREEETPAYQGPGIPELLSPMRDAPCLLKTKDWWTYEFCYGRHIQQYHMEDSEIKGEVLYLGYYQSAFDWDDETAKASKQHRLKRYHSQTYGNGSKCDLNGRPREAEVRGCTERFVSSPEEILDVIDEGKSNRHVAVTNMNEHSSRSHSIFLINIKQENMETEQKLSGKLYLVDLAGSEKVSKTGAEGAVLDEAKNINKSLSALGNVISALAEGTKSYVPYRDSKMTRILQDSLGGNCRTTMFICCSPSSYNDAETKSTLMFGQRAKTIKNTASVNLELTAEQWKKKYEKEKEKTKAQKETIAKLEAELSRWRNGENVPETERLAGEEAALGAELCEETPVNDNSSIVVRIAPEERQKYEEEIRRLYKQLDDKDDEINQQSQLIEKLKQQMLDQEELLVSTRGDNEKVQRELSHLQSENDAAKDEVKEVLQALEELAVNYDQKSQEVEEKSQQNQLLVDELSQKVATMLSLESELQRLQEVSGHQRKRIAEVLNGLMKDLSEFSVIVGNGEIKLPVEISGAIEEEFTVARLYISKIKSEVKSVVKRCRQLENLQVECHRKMEVTGRELSSCQLLISQHEAKIRSLTEYMQSVELKKRHLEESYDSLSDELAKLQAQETVHEVALKDKEPDTQDADEVKKALELQMESHREAHHRQLARLRDEINEKQKTIDELKDLNQKLQLELEKLQADYEKLKSEEHEKSTKLQELTFLYERHEQSKQDLKGLEETVARELQTLHNLRKLFVQDVTTRVKKSAEMEPEDSGGIHSQKQKISFLENNLEQLTKVHKQLVRDNADLRCELPKLEKRLRATAERVKALEGALKEAKEGAMKDKRRYQQEVDRIKEAVRYKSSGKRGHSAQIAKPVRPGHYPASSPTNPYGTRSPECISYTNSLFQNYQNLYLQATPSSTSDMYFANSCTSSGATSSGGPLASYQKANMDNGNATDINDNRSDLPCGYEAEDQAKLFPLHQETAAS

SEQ ID NO: 8442 - protein, 376 aa, synthetic construct
  source 1..376: note = Description of Artificial Sequence: Synthetic polypeptide
MKLADSVMAGKASDGSIKWQLCYDISARTWWMDEFHPFIEALLPHVRAFAYTWFNLQARKRKYFKKHEKRMSKEEERAVKDELLSEKPEVKQKWASRLLAKLRKDIRPEYREDFVLTVTGKKPPCCVLSNPDQKGKMRRIDCLRQADKVWRLDLVMVILFKGIPLESTDGERLVKSPQCSNPGLCVQPHHIGVSVKELDLYLAYFVHAAVISECQRQQLEAVSYSSRYALGLFYEAGTKIDVPWAGQYITSNPCIRFVSIDNKKRNIESSEIGPSLVIHTTVPFGVTYLEHSIEDVQELVFQQLENILPGLPQPIATKCQKWRHSQVTNAAANCPGQMTLHHKPFLACGGDGFTQSNFDGCITSALCVLEALKNYI

SEQ ID NO: 8443 - protein, 494 aa, synthetic construct
  source 1..494: note = Description of Artificial Sequence: Synthetic polypeptide
MMLRGNLKQVRIEKNPARLRALESAVGESEPAAAAAMALALAGEPAPPAPAPPEDHPDEEMGFTIDIKSFLKPGEKTYTQRCRLFVGNLPTDITEEDFKRLFERYGEPSEVFINRDRGFGFIRLESRTLAEIAKAELDGTILKSRPLRIRFATHGAALTVKNLSPVVSNELLEQAFSQFGPVEKAVVVVDDRGRATGKGFVEFAAKPPARKALERCGDGAFLLTTTPRPVIVEPMEQFDDEDGLPEKLMQKTQQYHKEREQPPRFAQPGTFEFEYASRWKALDEMEKQQREQVDRNIREAKEKLEAEMEAARHEHQLMLMRQDLMRRQEELRRLEELRNQELQKRKQIQLRHEEEHRRREEEMIRHREQEELRRQQEGFKPNYMENEGIVSPSDLDLVMSEGLGMRYAFIGPLETMHLNAEGMLSYCDRYSEGIKHVLQTFGPIPEFSRATAEKVNQDMCMKVPDDPEHLAARRQWRDECLMRLAKLKSQVQPQ

SEQ ID NO: 8444 - protein, 614 aa, synthetic construct
  source 1..614: note = Description of Artificial Sequence: Synthetic polypeptide
MKETIQGTGSWGPEPPGPGIPPAYSSPRRERLRWPPPPKPRLKSGGGFGPDPGSGTTVPARRLPVPRPSFDASASEEEEEEEEEEDEDEEEEVAAWRLPPRWSQLGTSQRPRPSRPTHRKTCSQRRRRAMRAFRMLLYSKSTSLTFHWKLWGRHRGRRRGLAHPKNHLSPQQGGATPQVPSPCCRFDSPRGPPPPRLGLLGALMAEDGVRGSPPVPSGPPMEEDGLRWTPKSPLDPDSGLLSCTLPNGFGGQSGPEGERSLAPPDASILISNVCSIGDHVAQELFQGSDLGMAEEAERPGEKAGQHSPLREEHVTCVQSILDEFLQTYGSLIPLSTDEVVEKLEDIFQQEFSTPSRKGLVLQLIQSYQRMPGNAMVRGFRVAYKRHVLTMDDLGTLYGQNWLNDQVMNMYGDLVMDTVPEKVHFFNSFFYDKLRTKGYDGVKRWTKNTRHYVGSAAAFAGTPEHGQFQGSPGGAYGTAQPPPHYGPTQPAYSPSQQLRAPSAFPAVQYLSQPQPQPYAVHGHFQPTQTGFLQPGGALSLQKQMEHANQQTGFSDSSSLRPMHPQALHPAPGLLASPQLPVQMQPAGKSGFAATSQPGPRLPFIQHSQNPRFYHK

SEQ ID NO: 8445 - protein, 306 aa, synthetic construct
  source 1..306: note = Description of Artificial Sequence: Synthetic polypeptide
MVNLAAMVWRRLLRKRWVLALVFGLSLVYFLSSTFKQDLDAGVSEHSGDWLDQDSVSDQFSVEFEVESLDSEDYSLSEEGQELSDEDDEVYQVTVYQAGESDTDSFEEDPEISLADYWKCTSCNEMNPPLPSHCNRCWALRENWLPEDKGKDKGEISEKAKLENSTQAEEGFDVPDCKKTIVNDSRESCVEENDDKITQASQSQESEDYSQPSTSSSIIYSSQEDVKEFEREETQDKEESVESSLPLNAIEPCVICQGRPKNGCIVHGKTGHLMACFTCAKKLKKRNKPCPVCRQPIQMIVLTYFP

SEQ ID NO: 8446 - protein, 536 aa, synthetic construct
  source 1..536: note = Description of Artificial Sequence: Synthetic polypeptide
MDAPRASAAKPPTGRKMKARAPPPPGKAATLHVHSDQKPPHDGALGSQQNLVRMKEALRASTMDVTVVLPSGLEKRSVLNGSHAMMDLLVELCLQNHLNPSHHALEIRSSETQQPLSFKPNTLIGTLNVHTVFLKEKVPEEKVKPGPPKVPEKSVRLVVNYLRTQKAVVRVSPEVPLQNILPVICAKCEVSPEHVVLLRDNIAGEELELSKSLNELGIKELYAWDNRRETFRKSSLGNDETDKEKKKFLGFFKVNKRSNSKAEQLVLSGADSDEDTSRAAPGRGLNGCLTTPNSPSMHSRSLTLGPSLSLGSISGVSVKSEMKKRRAPPPPGSGPPVQDKASEKGLLPFAVVGSTDEVKVGKRMVRGRHYPWGVLQVENENHCDFVKLRDMLLCTNMENLKEKTHTQHYECYRYQKLQKMGFTDVGPNNQPVSFQEIFEAKRQEFYDQCQREEEELKQRFMQRVKEKEATFKEAEKELQDKFEHLKMIQQEEIRKLEEEKKQLEGEIIDFYKMKAASEALQTQLSTDTKKDKHRKK

SEQ ID NO: 8447 - protein, 196 aa, synthetic construct
  source 1..196: note = Description of Artificial Sequence: Synthetic polypeptide
MKLALLLPWACCCLCGSALATGFLYPFSAAALQQHGYPEPGAGSPGSGYASRRHWCHHTVTRTVSCQVQNGSETVVQRVYQSCRWPGPCANLVSYRTLIRPTYRVSYRTVTVLEWRCCPGFTGSNCDEECMNCTRLSDMSERLTTLEAKIICMGAKENGLPLEYQEKLKAIEPNDYTGKVSEEIEDIIKKGETQTL

SEQ ID NO: 8448 - protein, 813 aa, synthetic construct
  source 1..813: note = Description of Artificial Sequence: Synthetic polypeptide
MAAETQTLNFGPEWLRALSSGGSITSPPLSPALPKYKLADYRYGREEMLALFLKDNKIPSDLLDKEFLPILQEEPLPPLALVPFTEEEQLKEILECSHLLTVIKMEEAGDEIVSNAISYALYKAFSTSEQDKDNWNGQLKLLLEWNQLDLANDEIFTNDRRWESADLQEVMFTALIKDRPKFVRLFLENGLNLRKFLTHDVLTELFSNHFSTLVYRNLQIAKNSYNDALLTFVWKLVANFRRGFRKEDRNGRDEMDIELHDVSPITRHPLQALFIWAILQNKKELSKVIWEQTRGCTLAALGASKLLKTLAKVKNDINAAGESEELANEYETRAVELFTECYSSDEDLAEQLLVYSCEAWGGSNCLELAVEATDQHFIAQPGVQNFLSKQWYGEISRDTKNWKIILCLFIIPLVGCGFVSFRKKPVDKHKKLLWYYVAFFTSPFVVFSWNVVFYIAFLLLFAYVLLMDFHSVPHPPELVLYSLVFVLFCDEVRQWYVNGVNYFTDLWNVMDTLGLFYFIAGIVFRLHSSNKSSLYSGRVIFCLDYIIFTLRLIHIFTVSRNLGPKIIMLQRMLIDVFFFLFLFAVWMVAFGVARQGILRQNEQRWRWIFRSVIYEPYLAMFGQVPSDVDGTTYDFAHCTFTGNESKPLCVELDEHNLPRFPEWITIPLVCIYMLSTNILLVNLLVAMFGYTVGTVQENNDQVWKFQRYFLVQEYCSRLNIPFPFIVFAYFYMVVKKCFKCCCKEKNMESSVCCFKNEDNETLAWEGVMKENYLVKINTKANDTSEEMRHRFRQLDTKLNDLKGLLKEIANKIK

SEQ ID NO: 8449 - protein, 1041 aa, synthetic construct; identical to SEQ ID NO: 5
  source 1..1041: note = Description of Artificial Sequence: Synthetic polypeptide

SEQ ID NO: 8450 - protein, 877 aa, synthetic construct
  source 1..877: note = Description of Artificial Sequence: Synthetic polypeptide
MITSAAGIISLLDEDEPQLKEFALHKLNAVVNDFWAEISESVDKIEVLYEDEGFRSRQFAALVASKVFYHLGAFEESLNYALGAGDLFNVNDNSEYVETIIAKCIDHYTKQCVENADLPEGEKKPIDQRLEGIVNKMFQRCLDDHKYKQAIGIALETRRLDVFEKTILESNDVPGMLAYSLKLCMSLMQNKQFRNKVLRVLVKIYMNLEKPDFINVCQCLIFLDDPQAVSDILEKLVKEDNLLMAYQICFDLYESASQQFLSSVIQNLRTVGTPIASVPGSTNTGTVPGSEKDSDSMETEEKTSSAFVGKTPEASPEPKDQTLKMIKILSGEMAIELHLQFLIRNNNTDLMILKNTKDAVRNSVCHTATVIANSFMHCGTTSDQFLRDNLEWLARATNWAKFTATASLGVIHKGHEKEALQLMATYLPKDTSPGSAYQEGGGLYALGLIHANHGGDIIDYLLNQLKNASNDATFSCTCEEQYVGTFCEEYDACQRKPCQNNASCIDANEKQDGSNFTCVCLPGYTGELCQSKIDYCILDPCRNGATCISSLSGFTCQCPEGYFGSACEEKVDPCASSPCQNNGTCYVDGVHFTCNCSPGFTGPTCAQLIDFCALSPCAHGTCRSVGTSYKCLCDPGYHGLYCEEEYNECLSAPCLNAATCRDLVNGYECVCLAEYKGTHCELYKDPCANVSCLNGATCDSDGLNGTCICAPGFTGEECDIDINECDSNPCHHGGSCLDQPNGYNCHCPHGWVGANCEIHLQWKSGHMAESLTNMPRHSLYIIIGALCVAFILMLIILIVGICRISRIEYQGSSRPAYEEFYNCRSIDSEFSNAIASIRHARFGKKSRPAMYDVSPIAYEDYSPDDKPLVTLIKTKDL

SEQ ID NO: 8451 - protein, 192 aa, synthetic construct
  source 1..192: note = Description of Artificial Sequence: Synthetic polypeptide
MAEGAQPHQPPQLGPGAAARGMKRESELELPVPGAGGDGADPGLSKRPRTEEAAADGGGGMQGELEVKNMDMKPGSTLKITGSIADGTDGFVINLGQGTDKLNLHFNPRFSESTIVCNSLDGSNWGQEQREDHLCFSPGSEVKFTVTFESDKFKVKLPDGHELTFPNRLGHSHLSYLSVRGGFNMSSFKLKE

SEQ ID NO: 8452 - protein, 442 aa, synthetic construct
  source 1..442: note = Description of Artificial Sequence: Synthetic polypeptide
MDRPGFVAALVAGGVAGVSVDLILFPLDTIKTRLQSPQGFSKAGGFHGIYAGVPSAAIGSFPNAAAFFITYEYVKWFLHADSSSYLTPMKHMLAASAGEVVACLIRVPSEVVKQRAQVSASTRTFQIFSNILYEEGIQGLYRGYKSTVLREIEEVRDAMENEMRTQLRRQAAAHTDHLRDVLRVQEQELKSEFEQNLSEKLSEQELQFRRLSQEQVDNFTLDINTAYARLRGIEQAVQSHAVAEEEARKAHQLWLSVEALKYSMKTSSAETPTIPLGSAVEAIKANCSDNEFTQALTAAIPPESLTRGVYSEETLRARFYAVQKLARRVAMIDETRNSLYQYFLSYLQSLLLFPPQQLKPPPELCPEDINTFKLLSYASYCIEHGDLELAAKFVNQLKGESRRVAQDWLKEARMTLETKQIVEILTAYASAVGIGTTQVQPE

SEQ ID NO: 8453 - protein, 276 aa, synthetic construct
  source 1..276: note = Description of Artificial Sequence: Synthetic polypeptide
MGVPKFYRWISERYPCLSEVVKEHQVICNSFTICNAEMQEVGVGLYPSISLLNHSCDPNCSIVFNGPHLLLRAVRDIEVGEELTICYLDMLMTSEERRKQLRDQYCFECDCFRCQTQDKDADMLTGDEQVWKEVQESLKKIEELKAHWKWEQVLAMCQAIISSNSERLPDINIYQLKVLDCAMDACINLGLLEEALFYGTRTMEPYRIFFPGSHPVRGVQVMKVGKLQLHQGMFPQAMKNLRLAFDIMRVTHGREHSLIEDLILLLEECDANIRAS

SEQ ID NO: 8454 - protein, 479 aa, synthetic construct
  source 1..479: note = Description of Artificial Sequence: Synthetic polypeptide
MAAAGARLSPGPGSGLRGRPRLCFHPGPPPLLPLLLLFLLLLPPPPLLAGATAAASREPDSPCRLKTVTVSTLPALRESDIGWSGARAGAGAGTGAGAAAAAASPGSPGSAGTAAESRLLLFVRNELPGRIAVQDDLDNTELPFFTLEMSGTAADISLVHWRQQWLENGTLYFHVSMSSSGQLAQATAPTLQEPSEIVEEQMHILHISVMGGLIALLLLLLVFTVALYAQRRWQKRRRIPQKSASTEATHEIHYIPSVLLGPQARESFRSSRLQTHNSVIGVPIRETPILDDYDCEEDEEPPRRANHVSREDEFGSQVTHTLDSLGHPGEEKVDFEKKDPSLPNVQVTRLTLLSEQAPGPVVMDLTGDLAVLKDQVFVLKEGVDYRVKISFKVHREIVSGLKCLHHTYRRGLRVDKTVYMVGSYGPSAQEYEFVTPVEEAPRGALVRGPYLVVSLFTDDDRTHHLSWEWGLCICQDWKD

SEQ ID NO: 8455 - protein, 639 aa, synthetic construct
  source 1..639: note = Description of Artificial Sequence: Synthetic polypeptide
MLRLQMTDGHISCTAVEFSYMSKISLNTPPGTKVKLSGIVDIKNGFLLLNDSNTTVLGGEVEHLIEKWELQRSLSKHNRSNIGTEGGPPPFVPFGQKCVSHVQVDSRELDRRKTLQVTMPVKPTNDNDEFEKQRTAAIAEVAKSKETKTFGGGGGGARSNLNMNAAGNRNREVLQKEKSTKSEGKHEGVYRELVDEKALKHITEMGFSKEASRQALMDNGNNLEAALNVLLTSNKQKPVMGPPLRGRGKGRGRIRSEDEEDLGNARPSAPSTLFDFLESKMGTLNVEEPKSQPQQLHQGQYRSSNTEQNGVKDNNHLRHPPRNDTRQPRNEKPPRFQRDSQNSKSVLEGSGLPRNRGSERPSTSSVSEVWAEDRIKCDRPYSRYDRTKDTSYPLGSQHSDGAFKKRDNSMQSRSGKGPSFAEAKENPLPQGSVDYNNQKRGKRESQTSIPDYFYDRKSQTINNEAFSGIKIEKHFNVNTDYQNPVRSNSFIGVPNGEVEMPLKGRRIGPIKPAGPVTAVPCDDKIFYNSGPKRRSGPIKPEKILESSIPMEYAKMWKPGDECFALYWEDNKFYRAEVEALHSSGMTAVVKFIDYGNYEEVLLSNIKPIQTEAWGYDHSYYFIATFITDHIRHHAKYLNA

SEQ ID NO: 8456 - protein, 1047 aa, synthetic construct
  source 1..1047: note = Description of Artificial Sequence: Synthetic polypeptide
MADPGMMSLFGEDGNIFSEGLEGLGECGYPENPVNPMGQQMPIDQGFASLQPSLHHPSTNQNQTKLTHFDHYNQYEQQKMHLMDQPNRMMSNTPGNGLASPHSQYHTPPVPQVPHGGSGGGQMGVYPGMQNERHGQSFVDSSSMWGPRAVQVPDQIRAPYQQQQPQPQPPQPAPSGPPAQGHPQHMQQMGSYMARGDFSMQQHGQPQQRMSQFSQGQEGLNQGNPFIATSGPGHLSHVPQQSPSMAPSLRHSVQQFHHHPSTALHGESVAHSPRFSPNPPQQGAVRPQTLNFSSRSQTVPSPTINNSGQYSRYPYSNLNQGLVNNTGMNQNLGLTNNTPMNQSVPRYPNAVGFPSNSGQGLMHQQPIHPSGSLNQMNTQTMHPSQPQGTYASPPPMSPMKAMSNPAGTPPPQVRPGSAGIPMEVGSYPNMPHPQPSHQPPGAMGIGQRNMGPRNMQQSRPFIGMSSAPRELTGHMRPNGCPGVGLGDPQAIQERLIPGQQHPGQQPSFQQLPTCPPLQPHPGLHHQSSPPHPHHQPWAQLHPSPQNTPQKVPVHQFDGENMYMSMTEPSQDYVPASQSYPGPSLESEDFNIPPITPPSLPDHSLVHLNEVESGYHSLCHPMNHNGLLPFHPQNMDLPEITVSNMLGQDGTLLSNSISVMPDIRNPEGTQYSSHPQMAAMRPRGQPADIRQQPGMMPHGQLTTINQSQLSAQLGLNMGGSNVPHNSPSPPGSKSATPSPSSSVHEDEGDDTSKINGGEKRPASDMGKKPKTPKKKKKKDPNEPQKPVSAYALFFRDTQAAIKGQNPNATFGEVSKIVASMWDGLGEEQKQVYKKKTEAAKKEYLKQLAAYRASLVSKSYSEPVDVKTSQPPQLINSKPSVFHGPSQAHSALYLSSHYHQQPGMNPHLTAMHPSLPRNIAPKPNNQMPVTVSIANMAVSPPPPLQISPPLHQHLNMQQHQPLTMQQPLGNQLPMQVQSALHSPTMQQGFTLQPDYQTIINPTSTAAQVVTQAMEYVRSGCRNPPPQPVDWNNDYCSSGGMQRDKALYLT

SEQ ID NO: 8457 - protein, 747 aa, synthetic construct
  source 1..747: note = Description of Artificial Sequence: Synthetic polypeptide
MASASYHISNLLEKMTSSDKDFRFMATNDLMTELQKDSIKLDDDSERKVVKMILKLLEDKNGEVQNLAVKCLGPLVSKVKEYQVETIVDTLCTNMLSDKEQLRDISSIGLKTVIGELPPASSGSALAANVCKKITGRLTSAIAKQEDVSVQLEALDIMADMLSRCTGPGLEGCPTNGPKIPSIATGMVGALLLLLVVALGIGLFMRRRHIVRKRTLRRLLQERELVEPLTPSGEAPNQALLRILKETEFKKIKVLGSGAFGTVYKGLWIPEGEKVKIPVAIKELREATSPKANKEILDEAYVMASVDNPHVCRLLGICLTSTVQLITQLMPFGCLLDYVREHKDNIGSQYLLNWCVQIAKGMNYLEDRRLVHRDLAARNVLVKTPQHVKITDFGLAKLLGAEEKEYHAEGGKVPIKWMALESILHRIYTHQSDVWSYGVTVWELMTFGSKPYDGIPASEISSILEKGERLPQPPICTIDVYMIMVKCWMIDADSRPKFRELIIEFSKMARDPQRYLVIQGDERMHLPSPTDSNFYRALMDEEDMDDVVDADEYLIPQQGFFSSPSTSRTPLLSSLSATSNNSTVACIDRNGLQSCPIKEDSFLQRYSSDPTGALTEDSIDDTFLPVPEYINQSVPKRPAGSVQNPVYHNQPLNPAPSRDPHYQDPHSTAVGNPEYLNTVQPTCVNSTFDSPAHWAQKGSHQISLDNPDYQQDFFPKEAKPNGIFKGSTAENAEYLRVAPQSSEFIGA

SEQ ID NO: 8458 - protein, 648 aa, synthetic construct
  source 1..648: note = Description of Artificial Sequence: Synthetic polypeptide
MNNLNDPPNWNIRPNSRADGGDGSRWNYALLVPMLGLAAFRVGCVPAAEHRLREEILAKFLHWLMSVYVVELLRSFFYVTETTFQKNRLFFYRKSVWSKLQSIGIRQHLKRVQLRELSEAEVRQHREARPALLTSRLRFIPKPDGLRPIVNMDYVVGARTFRREKRAERLTSRVKALFSVLNYERARRPGLLGASVLGLDDIHRAWRTFVLRVRAQDPPPELYFVKVDVTGAYDTIPQDRLTEVIASIIKPQNTYCVRRYAVVQKAAHGHVRKAFKSHVSTLTDLQPYMRQFVAHLQETSPLRDAVVIEQSSSLNEASSGLFDVFLRFMCHHAVRIRGKSYVQCQGIPQGSILSTLLCSLCYGDMENKLFAGIRRDGLLLRLVDDFLLVTPHLTHAKTFLRTLVRGVPEYGCVVNLRKTVVNFPVEDEALGGTAFVQMPAHGLFPWCGLLLDTRTLEVQSDYSSYARTSIRASLTFNRGFKAGRNMRRKLFGVLRLKCHSLFLDLQVNSLQTVCTNIYKILLLQAYRFHACVLQLPFHQQVWKNPTFFLRVISDTASLCYSILKAKNAGMSLGAKGAAGPLPSEAVQWLCHQAFLLKLTRHRVTYVPLLGSLRTAQTQLSRKLPGTTLTALEAAANPALPSDFKTILD

SEQ ID NO: 8459 - protein, 1938 aa, synthetic construct
  source 1..1938: note = Description of Artificial Sequence: Synthetic polypeptide
MLGTGPAAATTAATTSSNVSVLQQFASGLKSRNEETRAKAAKELQHYVTMELREMSQEESTRFYDQLNHHIFELVSSSDANERKGGILAIASLIGVEGGNATRIGRFANYLRNLLPSNDPVVMEMASKAIGRLAMAGDTFTAEYVEFEVKRALEWLGADRNEGRRHAAVLVLRELAISVPTFFFQQVQPFFDNIFVAVWDPKQAIREGAVAALRACLILTTQREPKEMQKPQWYRHTFEEAEKGFDETLAKEKGMNRDDRIHGALLILNELVRISSMEGESVSQSVFCGTSTYCVLNTVPPIEDDHGNSNSSHVKIFLPKKLLECLPKCSSLPKERHRWNTNEEIAAYLITFEKHEEWLTTSPKTRPQNGSMILYNRKKVKYRKDGYCWKKRKDGKTTREDHMKLKVQGVECLYGCYVHSSIIPTFHRRCYWLLQNPDIVLVHYLNVPAIEDCGKPCGPILCSINTDKKEWAKWTKEELIGQLKPMFHGIKWTCSNGNSSSGFSVEQLVQQILDSHQTKPQPRTHNCLCTGSLGAGGSVHHKCNSAKHRIISPKVEPRTGGYGSHSEVQHNDVSEGKHEHSHSKGSSREKRNGKVAKPVLLHQSSTEVSSTNQVEVPDTTQSSPVSISSGLNSDPDMVDSPVVTGVSGMAVASVMGSLSQSATVFMSEVTNEAVYTMSPTAGPNHHLLSPDASQGLVLAVSSDGHKFAFPTTGSSESLSMLPTNVSEELVLSTTLDGGRKIPETTMNFDPDCFLNNPKQGQTYGGGGLKAEMVSSNIRHSPPGERSFSFTTVLTKEIKTEDTSFEQQMAKEAYSSSAAAVAASSLTLTAGSSLLPSGGGLSPSTTLEQMDFSAIDSNKDYTSSFSQTGHSPHIHQTPSPSFFLQDASKPLPVEQNTHSSLSDSGGTFVMPTVKTEASSQTSSCSGHVETRIESTSSLHLMQFQANFQAMTAEGEVTMETSQAAEGSEVLLKSGELQACSSEHYLQPETNGVIRSAGGVPILPGNVVQGLYPVAQPSLGNASNMELSLDHFDISFSNQFSDLINDFISVEGGSSTIYGHQLVSGDSTALSQSEDGARAPFTQAEMCLPCCSPQQGSLQLSSSEGGASTMAYMHVAEVVSAASAQGTLGMLQQSGRVFMVTDYSPEWSYPEGGVKVLITGPWQEASNNYSCLFDQISVPASLIQPGVLRCYCPAHDTGLVTLQVAFNNQIISNSVVFEYKARALPTLPSSQHDWLSLDDNQFRMSILERLEQMERRMAEMTGSQQHKQASGGGSSGGGSGSGNGGSQAQCASGTGALGSCFESRVVVVCEKMMSRACWAKSKHLIHSKTFRGMTLLHLAAAQGYATLIQTLIKWRTKHADSIDLELEVDPLNVDHFSCTPLMWACALGHLEAAVVLYKWDRRAISIPDSLGRLPLGIARSRGHVKLAECLEHLQRDEQAQLGQNPRIHCPASEEPSTESWMAQWHSEAISSPEIPKGVTVIASTNPELRRPRSEPSNYYSSESHKDYPAPKKHKLNPEYFQTRQEKLLPTALSLEEPNIRKQSPSSKQSVPETLSPSEGVRDFSRELSPPTPETAAFQASGSQPVGKWNSKDLYIGVSTVQVTGNPKGTSVGKEAAPSQVRPREPMSVLMMANREVVNTELGSYRDSAENEECGQPMDDIQVNMMTLAEHIIEATPDRIKQENFVPMESSGLERTDPATISSTMSWLASYLADADCLPSAAQIRSAYNEPLTPSSNTSLSPVGSPVSEIAFEKPNLPSAADWSEFLSASTSEKVENEFAQLTLSDHEQRELYEAARLVQTAFRKYKGRPLREQQEVAAAVIQRCYRKYKQYALYKKMTQAAILIQSKFRSYYEQKKFQQSRRAAVLIQKYYRSYKKCGKRRQARRTAVIVQQKLRSSLLTKKQDQAARKIMRFLRRCRHSPLVDHRLYKRSERIEKGQGT

SEQ ID NO: 8460 - protein, 72 aa, synthetic construct
  source 1..72: note = Description of Artificial Sequence: Synthetic polypeptide
MARGYGATVSLVLLGLGLALAVIVLAVVLSRHQAPCGPQAFAHAAVAADSKVCSDIGRQETAYLLVYMKMEC

SEQ ID NO: 8461 - protein, 313 aa, synthetic construct
  source 1..313: note = Description of Artificial Sequence: Synthetic polypeptide
MFVYVLTPGEQSGRRLPGQTWLMFSCFCFSLQDNSFSSTTVTECDEDPVSLHEDQTDCSSLRDENNKENYPDAGALVEEHAPPSWEPQQQNVEATVLVDSVLRPSMGNFKSRKPKSIFKAESGRSHGESQETEHVVSSQSECQVRAGTPAHESPQNNAFKCQETVRLQPRSRKDSLESDSSTAIIPHELIRTRQLESVHLKFNQESGALIPLCLRGRLLHGRHFTYKSITGDMAITFVSTGVEGAFATEEHPYAAHGPWLQILLTEEFVEKMLEDLEDLTSPEEFKLPKEYSWPEKKLKVSILPDVVFDSPLH

SEQ ID NO: 8462 - protein, 2826 aa, synthetic construct
  source 1..2826: note = Description of Artificial Sequence: Synthetic polypeptide
MHSAGTPGLSSRRTGNSTSFQPGPPPPPRLLLLLLLLLSLVSRVPAQPAAFGRALLSPGLAGAAGVPAEEAIVLANRGLRVPFGREVWLDPLHDLVLQVQPGDRCAVSVLDNDALAQRPGRLSPKRFPCDFGPGEVRYSHLGARSPSRDRVRLQLRYDAPGGAVVLPLVLEVEVVFTQLEVVTRNLPLVVEELLGTSNALDARSLEFAFQPETEECRVGILSGLGALPRYGELLHYPQVPGGAREGGAPETLLMDCKAFQELGVRYRHTAASRSPNRDWIPMVVELRSRGAPVGSPALKREHFQVLVRIRGGAENTAPKPSFVAMMMMEVDQFVLTALTPDMLAAEDAESPSDLLIFNLTSPFQPGQGYLVSTDDRSLPLSSFTQRDLRLLKIAYQPPSEDSDQERLFELELEVVDLEGAASDPFAFMVVVKPMNTMAPVVTRNTGLILYEGQSRPLTGPAGSGPQNLVISDEDDLEAVRLEVVAGLRHGHLVILGASSGSSAPKSFTVAELAAGQVVYQHDDRDGSLSDNLVLRMVDGGGRHQVQFLFPITLVPVDDQPPVLNANTGLTLAEGETVPILPLSLSATDMDSDDSLLLFVLESPFLTTGHLLLRQTHPPHEKQELLRGLWRKEGAFYERTVTEWQQQDITEGRLFYRHSGPHSPGPVTDQFTFRVQDNHDPPNQSGLQRFVIRIHPVDRLPPELGSGCPLRMVVQESQLTPLRKKWLRYTDLDTDDRELRYTVTQSPTDTDENHLPAPLGTLVLTDNPSVVVTHFTQAQINHHKIAYRPPGQELGVATRVAQFQFQVEDRAGNVAPGTFTLYLHPVDNQPPEILNTGFTIQEKGHHILSETELHVNDVDTDVAHISFTLTQAPKHGHMRVSGQILHVGGLFHLEDIKQGRVSYAHNGDKSLTDSCSLEVSDRHHVVPITLRVNVRPVDDEVPILSHPTGTLESYLDVLENGATEITANVIKGTNEETDDLMLTFLLEDPPLYGEILVNGIPAEQFTQRDILEGSVVYTHTSGEIGLLPKADSFNLSLSDMSQEWRIGGNTIQGVTIWVTILPVDSQAPEIFVGEQLIVMEGDKSVITSVHISAEDVDSLNDDILCTIVIQPTSGYVENISPAPGSEKSRAGIAISAFNLKDLRQGHINYVQSVHKGVEPVEDRFVFRCSDGINFSERQFFPIVIIPTNDEQPEMFMREFMVMEGMSLVIDTPILNAADADVPLDDLTFTITQFPTHGHIMNQLINGTVLVESFTLDQIIESSSIIYEHDDSETQEDSFVIKLTDGKHSVEKTVLIIVIPVDDETPRMTINNGLEIEIGDTKIINNKILMATDLDSEDKSLVYIIRYGPGHGLLQRRKPTGAFENITLGMNFTQDEVDRNLIQYVHLGQEGIRDLIKFDVTDGINPLIDRYFYVSIGSIDIVFPDVISKGVSLKEGGKVTLTTDLLSTSDLNSPDENLVFTITRAPMRGHLECTDQPGVSITSFTQLQLAGNKIYYIHTADDEVKMDSFEFQVTDGRNPVFRTFRISISDVDNKKPVVTIHKLVVSESENKLITPFELTVEDRDTPDKLLKFTITQVPIHGHLLFNNTRPVMVFTKQDLNENLISYKHDGTESSEDSFSFTVTDGTHTDFYVFPDTVFETRRPQVMKIQVLAVDNSVPQIAVNKGASTLRTLATGHLGFMITSKILKVEDRDSLHISLRFIVTEAPQHGYLLNLDKGNHSITQFTQADIDDMKICYVLREGANATSDMFYFAVEDGGGNKLTYQNFRLNWAWISFEKEYYLVNEDSKFLDVVLKRRGYLGETSFISIGTRDRTAEKDKDFKGKAQKQVQFNPGQTRATWRVRILSDGEHEQSETFQVVLSEPVLAALEFPTVATVEIVDPGDEPTVFIPQSKYSVEEDVGELFIPIRRSGDVSQELMVVCYTQQGTATGTVPTSVLSYSDYISRPEDHTSVVRFDKDEREKLCRIVIIDDSLYEEEETFHVLLSMPMGGRIGSEFPGAQVTIVPDKDDEPIFYFGDVEYSVDESAGYVEVQVWRTGTDLSKSSSVTVRSRKTDPPSADAGTDYVGISRNLDFAPGVNMQPVRVVILDDLGQPALEGIEKFELVLRMPMNAALGEPSKATVSINDSVSDLPKMQFKERIYTGSESDGQIVTMIHRTGDVQYRSSVRCYTRQGSAQVMMDFEERPNTDTSIITFLPGETEKPCILELMDDVLYEEVEELRLVLGTPQSNSPFGAAVGEQNETLIRIRDDADKTVIKFGETKFSVTEPKEPGESVVIRIPVIRQGDTSKVSIVRVHTKDGSATSGEDYHPVSEEIEFKEGETQHVVEIEVTFDGVREMREAFTVHLKPDENMIAEMQLTKAIVYIEEMSSMADVTFPSVPQIVSLLMYDDTSKAKESAEPMSGYPVICITACNPKYSDYDKTGSICASENINDTLTRYRWLISAPAGPDGVTSPMREVDFDTFFTSSKMVTLDSIYFQPGSRVQCAARAVNTNGDEGLELMSPIVTISREEGLCQPRVPGVVGAEPFSAKLRYTGPEDADYTNLIKLTVTMPHIDGMLPVISTRELSNFELTLSPDGTRVGNHKCSNLLDYTEVKTHYGFLTDATKNPEIIGETYPYQYSLSIRGSTTLRFYRNLNLEACLWEFVSYYDMSELLADCGGTIGTDGQVDVKLDPKDLRIDTFRAKGAGGQHVNKTDSAVRLVHIPTGLVVECQQERSQIKNKEIAFRVLRARLYQQIIEKDKRQQQSARKLQVGTRAQSERIRTYNFTQDRVSDHRIAYEVRDIKAQSHSTGGSRDPAHSTFLSLDSVRSPGILIMTSSVRNFYVVGRAWIS

SEQ ID NO: 8463 - protein, 545 aa, synthetic construct
  source 1..545: note = Description of Artificial Sequence: Synthetic polypeptide
MAIDRRREAAGGGPGRQPAPAEENGSLPPGDAAASAPLGGRAGPGGGAEIQPLPPLHPGGGPHPSCCSAAAAPSLLLLDYDGSVLPFLGGLGGGYQKTLVLLTWIPALFIGFSQFSDSFLLDQPNFWCRGAGKGTELAGVTTTGRGGDMGNWTSLPTTPFATAPWEAAGNRSNSSGADGGDTPPLPSPPDKGDNASNCDCRAWDYGIRAGLVQNVVSKWDLVCDNAWKVHIAKFSLLVGLIFGYLITGCIADWVGRRPVLLFSIIFILIFGLTVALSVNVTMFSTLRFFEGFCLAGIILTLYALRIDILKLVAAQVGSQWKDIYQFLCNASEREVAAFSNGYTADHERAYAALQHWTIRGPEASLAQLISALRQHRRNDVVEKIRGLMEDTTQLETDKLALPMSPSPLSPSPIPSPNAKLENSALLTVEPSPQDKNKGFFVDESEPLLRCDSTSSGSSALSRNGSFITKEKKDTVLRQVRLDPCDLQPIFDDMLHFLNPEELRVIEEIPQAEDKLDRLFEIIGVKSQEASQTLLDSVYSHLPDLL

SEQ ID NO: 8464 - protein, 430 aa, synthetic construct
  source 1..430: note = Description of Artificial Sequence: Synthetic polypeptide
MENTDRKVSSLHTSRVQRQMVVSVHDLPEKSFVPLLDSKYVLCVWDIWQPSGPQKVLICESQVTCCCLSPLKAFLLFAGTAHGSVVVWDLREDSRLHYSVTLSDGFWTFRTATFSTDGILTSVNHRSPLQAVEPISTSVHKKQSFVLSPFSTQEEMSGLSFHIASLDESGVLNVWVVVELPKADIAGSISDLGLMPGGRVKLVHSALIQLGDSLSHKGNEFWGTTQTLNVKFLPSDPNHFIIGTDMGLISHGTRQDLRVAPKLFKPQQHGIRPVKVNVIDFSPFGEPIFLAGCSDGSIRLHQLSSAFPLLQWDSSTDSHAVTGLQWSPTRPAVFLVQDDTSNIYIWDLLQSDLGPVAKQQVSPNRLVAMAAVGEPEKAGGSFLALVLARASGSIDIQHLKRRWAAPEVDECNRLRLLLQEALWPEGKLHK

SEQ ID NO: 8465 - protein, 442 aa, synthetic construct
  source 1..442: note = Description of Artificial Sequence: Synthetic polypeptide
MTCPRNVTPNSYAEPLAAPGGGERYSRSAGMYMQSGSDFNCGVMRGCGLAPSLSKRDEGSSPSLALNTYPSYLSQLDSWGDPKAAYRLEQPVGRPLSSCSYPPSVKEENVCCMYSAEKRAKSGPEAALYSHPLPESCLGEHEVPVPSYYRASPSYSALDKTPHCSGANDFEAPFEQRASLNPRAEHLESPQLGGKVSFPETPKSDSQTPSPNEIKTEQSLAGPKGSPSESEKERAKAADSSPDTSDNEAKGKYIASTQRPDGTWRKQRRVKEGYVPQEEVPVYENKYVKFFKSKPELPPGLSPEATAPVTPSRPEGGEPGLSKTAKRNLKRKEKRRQQQEKGEAEALSRTLDKVSLEETAQLPSAPQGSRAAPTAASDQPDSAATTEKAKKIKNLKKKLRQVEELQQRIQAGEVSQPSKEQLEKLARRRALEEELEDLELGL

SEQ ID NO: 8466 - protein, 770 aa, synthetic construct
  source 1..770: note = Description of Artificial Sequence: Synthetic polypeptide
MAAEKQVPGGGGGGGSGGGGGSGGGGSGGGRGAGGEENKENERPSAGSKANKEFGDSLSLEILQIIKESQQQHGLRHGDFQRYRGYCSRRQRRLRKTLNFKMGNRHKFTGKKVTEELLTDNRYLLLVLMDAERAWSYAMQLKQEANTEPRKRFHLLSRLRKAVKHAEELERLCESNRVDAKTKLEAQAYTAYLSGMLRFEHQEWKAAIEAFNKCKTIYEKLASAFTEEQAVLYNQRVEEISPNIRYCAYNIGDQSAINELMQMRLRSGGTEGLLAEKLEALITQTRAKQAATMSEVEWRGRTVPVKIDKVRIFLLGLADNEAAIVQAESEETKERLFESMLSECRDAIQVVREELKPDQPLISRNYKGDVAMSKIEHFMPLLVQREEEGALAPLLSHGQVHFLWIKHSNLYLVATTSKNANASLVYSFLYKTIEVFCEYFKELEEESIRDNFVIVYELLDELMDFGFPQTTDSKILQEYITQQSNKLETGKSRVPPTVTNAVSWRSEGIKYKKNEVFIDVIESVNLLVNANGSVLLSEIVGTIKLKVFLSGMPELRLGLNDRVLFELTGLSGSKNKSVELEDVKFHQCVRLSRFDNDRTISFIPPDGDFELMSYRLSTQVKPLIWIESVIEKFSHSRVEIMVKAKGQFKKQSVANGVEISVPVPSDADSPRFKTSVGSAKYVPERNVVIWSIKSFPGGKEYLMRAHFGLPSVEKEEVEGRPPIGVKFEIPYFTVSGIQVRYMKIIEKSGYQALPWVRYITQSGDYQLRTS

SEQ ID NO: 8467 - protein, 462 aa, synthetic construct
  source 1..462: note = Description of Artificial Sequence: Synthetic polypeptide
MSLLRSLRVFLVARTGSYPAGSLLRQSPQPRHTFYAGPRLSASASSKELLMKLRRKTGYSFVNCKKALETCGGDLKQAEIWLHKEAQKEGWSKAAKLQGRKTKEGLIGLLQEGNTTVLVEVNCETDFVSRNLKFQLLVQQVALGTMMHCQTLKDQPSAYSKVQWLTPVNLALWEAEAGGSLEGFLNSSELSGLPAGPDREGSLKDQLALAIDSTSAYSSLLTFHLSTPRSHHLYHARLWLHVLPTLPGTLCLRIFRWGPRRRRQGSRTLLAEHHITNLGWHTLTLPSSGLRGEKSGVLKLQLDCRPLEGNSTVTGQPRRLLDTAGHQQPFLELKIRANEPGAGRARRRTPTCEPATPLCCRRDHYVDFQELGWRDWILQPEGYQLNYCSGQCPPHLAGSPGIAASFHSAVFSLLKANNPWPASTSCCVPTARRPLSLLYLDHNGNVVKTDVPDMVVEACGCS

SEQ ID NO: 8468 - protein, 930 aa, synthetic construct
  source 1..930: note = Description of Artificial Sequence: Synthetic polypeptide
MASLRRVKVLLVLNLIAVAGFVLFLAKCRPIAVRSGDAFHEIRPRAEVANLSAHSASPIQDAVLKRLSLLEDIVYRQLNGLSKSLGLIEGYGGRGKGGLPATLSPAEEEKAKGPHEKYGYNSYLSEKISLDRSIPDYRPTKFVIGREKPGQVSEVAQLISQTLEQERRQRELLEQHYAQYDADDDENTVAELQGMSGNCNNNNNYFLKTGEYATDEEEDEVGPVLPGSDMAIEVFELPENEDMFSPSELDTSKLSHKFKELQIKHAVTEAEIQKLKTKLQAAENEKVRWELEKTQLQQNIEENKERMLKLESYWIEAQTLCHTVNEHLKETQSQYQALEKKYNKAKKLIKDFQQKELDFIKRQEAERKKIEDLEKAHLVEVQGLQVRIRDLEAEVFRLLKQNGTQVNNNNNIFERRTSLGEVSKGDTMENLDGKQTSCQDGLSQDLNEAVPETERLDSKALKTRAQLSVKNRRQRPSRTRLYDSVSSTDGEDSLERKPSNSFYNHMHITKLLPPKGLRTSSPESDSGVPPLTPVDSNVPFSSDHIAEFQEEPLDPEMGPLSSMWGDTSLFSTSKSDHDVEESPCHHQTTNKKILREKDDAKDPKSLRASSSLAVQGGKIKRKFVDLGAPLRRNSSKGKKWKEKEKEASRFSAGSRIFRGRLENWTPKPCSTAQTSTRSPCMPFSWFNDSRKGSYSFRNLPAPTSSLQPSPETLISDKKGSKVENTWITKANKRNPNPSSSSIFGRHSQLMSVVWIQETNNFTFNDDFSPSSTSSADLSGLGAEPKTPGLSQSLALSSDEILDDGQSPKHSQCQNRAVQEWSVQQVSHWLMSLNLEQYVSEFSAQNITGEQLLQLDGNKLKALGMTASQDRAVVKKKLKEMKMSLEKARKAQEKMEKQREKLRRKEQEQMQRKSKKTEKMTSTTAEGAGEQ

SEQ ID NO: 8469 - protein, 722 aa, synthetic construct
  source 1..722: note = Description of Artificial Sequence: Synthetic polypeptide
MQSTQAHENSRDSRLAWMGTWEHLVSTGFNQMREREVKLWDTRFFSSALASLTLDTSLGCLVPLLDPDSGLLVLAGKGERQLYCYEVVPQQPALSPVTQCVLESVLRGAALVPRQALAVMSCEVLRVLQLSDTAIVPIGYHVPRKAVEFHEDLFPDTAGCVPATDPHSWWAGDNQQVQKVSLNPACRPHPSFTSCLVPPAEPLPDTAQPAVMETPVGDADASEGFSSPPSSLTSPSTPSSLGPSLSSTSGIGTSPSLRSLQSLLGPSSKFRHAQGTVLHRDSHITNLKGLNLTTPGESDGFCANKLRVAVPLLSSGGQVAVLELRKPGRLPDTALPTLQNGAAVTDLAWDPFDPHRLAVAGEDARIRLWRVPAEGLEEVLTTPETVLTGHTEKICSLRFHPLAANVLASSSYDLTVRIWDLQAGADRLKLQGHQDQIFSLAWSPDGQQLATVCKDGRVRVYRPRSGPEPLQEGPGPKGGRGARIVWVCDGRCLLVSGFDSQSERQLLLYEAEALAGGPLAVLGLDVAPSTLLPSYDPDTGLVLLTGKGDTRVFLYELLPESPFFLECNSFTSPDPHKGLVLLPKTECDVREVELMRCLRLRQSSLEPVAFRLPRVRKEFFQDDVFPDTAVIWEPVLSAEAWLQGANGQPWLLSLQPPDMSPVSQAPREAPARRAPSSAQYLEEKSDQQKKEELLNAMVAKLGNREDPLPQDSFEGVDEDEWD

SEQ ID NO: 8470 - protein, 103 aa, synthetic construct
  source 1..103: note = Description of Artificial Sequence: Synthetic polypeptide
MGETMSKRLKLHLGGEAEMEERAFVNPFPDYEAAAGALLASGAAEETGCVRPPATTDEPGLPFHQDGKDAFIGFGGNVIRQQVKDNAKWYITDFVELLGELEE

SEQ ID NO: 8471 - protein, 431 aa, synthetic construct
  source 1..431: note = Description of Artificial Sequence: Synthetic polypeptide
MPQSKSRKIAILGYRSVASGLSSSPSTPTQVTKQHTFPLESYKHEPERLENRIYASSSPPDTGQRFCPSSFQSPTRPPLASPTHYAPSKAAALAAALGPAEAGMLEKLEFEDEAVEDSESGVYMRFMRSHKCYDIVPTSSKLVVFDTTLQVKKAFFALVANGVRAAPLWESKKQSFVGMLTITDFINILHRYYKSPMVQIYELEEHKIETWRELYLQETFKPLVNISPDASLFDAVYSLIKNKIHRLPVIDPISGNALYILTHKRILKFLQLFMSDMPKPAFMKQNLDELGIGTYHNIAFIHPDTPIIKALNIFVERRISALPVVDESGKVVDIYSKFDVINLAAEKTYNNLDITVTQALQHRSQYFEGVVKCNKLEILETIVDRIVRAEVHRLVVVNEADSIVGIISLSDILQALILTPAGAKQKETETE

SEQ ID NO: 8472 - protein, 396 aa, synthetic construct
  source 1..396: note = Description of Artificial Sequence: Synthetic polypeptide
MGAGPSLLLAALLLLLSGDGAVRCDTPANCTYLDLLGTWVFQVGSSGSQRDVNCSVMGPQEKKVVVYLQKLDTAYDDLGNSGHFTIIYNQGFEIVLNDYKWFAFFKYKEEGSKVTTYCNETMTGWVHDVLGRNWACFTGKKVGTASENVYVNIAHLKNSQEKYSNRLYKYDHNFVKAINAIQKSWTATTYMEYETLTLGDMIRRSGGHSRKIPRPKPAPLTAEIQQKILHLPTSWDWRNVHGINFVSPVRNQGQERFGNMTRVYYREAMGAFIVFDVTRPATFEAVAKWKNDLDSKLSLPNGKPVSVVLLANKCDQGKDVLMNNGLKMDQFCKEHGFVGWFETSAKENINIDEASRCLVKHILANECDLMESIEPDVVKPHLTSTKVASCSGCAKS

SEQ ID NO: 8473 - protein, 1690 aa, synthetic construct
  source 1..1690: note = Description of Artificial Sequence: Synthetic polypeptide
MAERGLEPSPAAVAALPPEVRAQLAELELELSEGDITQKGYEKKRSKLLSPYSPQTQETDSAVQKELRNQTPAPSAAQTSAPSKYHRTRSGGARDERYRSDIHTEAVQAALAKHKEQKMALPMPTKRRSTFVQSPADACTPPDTSSASEDEGSLRRQAALSAALQQSLQNAESWINRSIQGSSTSSSASSTLSHGEVKGTSGSLADVFANTRIENFSAPPDVTTTTSSSSSSSSIRPANIDLPPSGIVKGMHKGSNRSSLMDTADGVPVSSRVSTKIQQLLNTLKRPKRPPLKEFFVDDSEEIVEVPQPDPNQPKPEGRQMTPVKGEPLGVICNWPPALESALQRWGTTQAKCSCLTALDMTGKPVYTLTYGKLWSRSLKLAYTLLNKLGTKNEPVLKPGDRVALVYPNNDPVMFMVAFYGCLLAEVIPVPIEVPLTRKDAGGQQIGFLLGSCGIALALTSEVCLKGLPKTQNGEIVQFKGWPRLKWVVTDSKYLSKPPKDWQPHISPAGTEPAYIEYKTSKEGSVMGVTVSRLAMLSHCQALSQACNYSEGETIVNVLDFKKDAGLWHGMFANVMNKMHTISVPYSVMKTCPLSWVQRVHAHKAKVALVKCRDLHWAMMAHRDQRDVSLSSLRMLIVTDGANPWSVSSCDAFLSLFQSHGLKPEAICPCATSAEAMTVAIRRPGVPGAPLPGRAILSMNGLSYGVIRVNTEDKNSALTVQDVGHVMPGGMMCIVKPDGPPQLCKTDEIGEICVSSRTGGMMYFGLAGVTKNTFEVIPVNSAGSPVGDVPFIRSGLLGFVGPGSLVFVVGKMDGLLMVSGRRHNADDIVATGLAVESIKTVYRGRIAVFSVSVFYDERIVVVAEQRPDASEEDSFQWMSRVLQAIDSIHQVGVYCLALVPANTLPKTPLGGIHISQTKQLFLEGSLHPCNILMCPHTCVTNLPKPRQKQPGVGPASVMVGNLVAGKRIAQAAGRDLGQIEENDLVRKHQFLAEILQWRAQATPDHVLFMLLNAKGTTVCTASCLQLHKRAERIASVLGDKGHLNAGDNVVLLYPPGIELIAAFYGCLYAGCIPVTVRPPHAQNLTATLPTVRMIVDVSKAACILTSQTLMRLLRSREAAAAVDVKTWPTIIDTDDLPRKRLPQLYKPPTPEMLAYLDFSVSTTGMLTGVKMSHSAVNALCRAIKLQCELYSSRQIAICLDPYCGLGFALWCLCSVYSGHQSVLIPPMELENNLFLWLSTVNQYKIRDTFCSYSVMELCTKGLGNQVEVLKTRGINLSCVRTCVVVAEERPRVALQQSFSKLFKDIGLSPRAVSTTFGSRVNVAICLQGTSGPDPTTVYVDLKSLRHDRVRLVERGAPQSLLLSESGKRSGSKQSTNPADNYHLARRRTLQVVVSSLLTEAGFESAEKASVETLTEMLQSYISEIGRSAKSYCEHTARTQPTLSDIVVTLVEMGFNVDTLPAYAKRSQRMVITAPPVTNQPVTPKALTAGQNRPHPPHIPSHFPEFPDPHTYIKTPTYREPVSDYQVLREKAASQRRDVERALTRFMAKTGETQSLFKDDVSTFPLIAARPFTIPYLTALLPSELEMQQMEETDSSEQDEQTDTENLALHISMIESRSVTQAGVQWQDLGSLQPPPPGFKRFSSLSLLSSWNYRRILEPRRRTPLSCSRTPPCRVAGMGRRTSSITLICGR

SEQ ID NO: 8474 - protein, 563 aa, synthetic construct
  source 1..563: note = Description of Artificial Sequence: Synthetic polypeptide
MEPPAAKRSRGCPAGPEERDAGAGAARGRGRPEALLDLSAKRVAESWAFEQVEERFSRVPEPVQKRIVFWSFPRSEREICMYSSLGYPPPEGEHDARVPFTRGLHLLQSGAVDRVLQVGFHLSGNIREPGSPGEPERLYHVSISFDRCKITSVSCGCDNRDLFYCAHVVALSLYRIRHAHQVELRLPISETLSQMNRDQLQKFVQYLISAHHTEVLPTAQRLADEILLLGSEINLVNGAPDPTAGAGIEDANCWHLDEEQIQEQVKQLLSNGGYYGASQQLRSMFSKVREMLRMRDSNGARMLILMTEQFLQDTRLALWRQQGAGMTDKCRQLWDELGMFNSPEMQALLQQISENPQLMQNVISAPYMRSMMQTLAQNPDFAAQMMVNVPLFAGNPQLQEQLRLQLPVFLQQMQNPESLSILTNPRAMQALLQIQQGLQTLQTEAPGLVPSLGSFGISRTPAPSAGSNAGSTPEAPTSSPATPATSSPTGASSAQQQLMQQMIQLLAGSGNSQVQTPEVRFQQQLEQLNSMGFINREANLQALIATGGDINAAIERLLGSQLS

SEQ ID NO: 8475 - protein, 906 aa, synthetic construct
  source 1..906: note = Description of Artificial Sequence: Synthetic polypeptide
MDVLPTGGGRPGLRTELEFRGGGGEARLESQEEETIPAAPPAPRLRGAAERPRRSRDTWDGDEDTEPGEACGGRTSRTASLVSGLLNELYSCTEEEEAAGGGRGAEGRRRRRDSLDSSTEASGSDVVLGGRSGAGDSRVLQELQERPSQRHQMLYLRQKDANELKTILRELKYRIGIQSAKLLRHLKQKDRLLHKVQRNCDIVTACLQAVSQKRRVDTKLKFTLEPSLGQNGFQQWYDALKAVARLSTGIPKEWRRKVWLTLADHYLHSIAIDWDKTMRFTFNERSNPDDDSMGIQIVKDLHRTGCSSYCGQEAEQDRVVLKRVLLAYARWNKTVGYCQGFNILAALILEVMEGNEGDALKIMIYLIDKVLPESYFVNNLRALSVDMAVFRDLLRMKLPELSQHLDTLQRTANKESGGGYEPPLTNVFTMQWFLTLFATCLPNQTVLKIWDSVFFEGSEIILRVSLAIWAKLGEVINAGKSTHNEDQASCEVLTVKKKAGAVTSTPNRNSSKRRSSLPNGEGLQLKENSESEGVSCHYWSLFDGHAGSGAAVVASRLLQHHITEQLQDIVDILKNSAVLPPTCLGEEPENTPANSRTLTRAASLRGGVGAPGSPSTPPTRFFTEKKIPHECLVIGALESAFKEMDLQIERERSSYNISGGCTALIVICLLGKLYVANAGDSRAIIIRNGEIIPMSSEFTPETERQRLQYLAFMQPHLLGNEFTHLEFPRRVQRKELGKKMLYRDFNMTGWAYKTIEDEDLKFPLIYGEGKKARVMATIGVTRGLGDHDLKVHDSNIYIKPFLSSAPEVRIYDLSKYDHGSDDVLILATDGLWDVLSNEEVAEAITQFLPNCDPDDPHRYTLAAQDLVMRARGVLKDRGWRISNDRLGSGDDISVYVIPLIHGNKLS

SEQ ID NO: 8476 - protein, 326 aa, synthetic construct
  source 1..326: note = Description of Artificial Sequence: Synthetic polypeptide
MDNMSITNTPTSNDACLSIVHSLMCHRQGGESETFAKRAIESLVKKLKEKKDELDSLITAITTNGAHPSKCVTIQRTLDGRLQVAGRKGFPHVIYARLWRWPDLHKNELKHVKYCQYAFDLKCDSVCVNPYHYERVVSPGIDLSGLTLQSNAPSSMMVKDEYVHDFEGQPSLSTEGHSIQTIQHPPSNRASTETYSTPALLAPSESNATSTANFPNIPVASTSQPASILGGSHSEGLLQIASGPQPGQQQNGFTGQPATYHHNSTTTWTGSRTAPYTPNLPHHQNGHLQHHPPMPPHPGHYWPVHNELAFQPPISNHPGVVPEPTG

SEQ ID NO: 8477 - protein, 257 aa, synthetic construct
  source 1..257: note = Description of Artificial Sequence: Synthetic polypeptide
MAAAAGAPPPGPPQPPPPPPPEESSDSEPEAEPGSPQKLIRKVSTSGQIRQKTIIKEGMLTKQNNSFQRSKRRYFKLRGRTLYYAKTAKSIIFDEVDLTDASVAESSTKNVNNSFTVEVLDENNLVMNLEFSIRETTCRKDSGEDPATCAFQRDYYVSTAVCRSTVKVSAQQVQGVHARCSWSSSTSESYSSEEMIFGDMLGSHKWRNNYLFGLISDESISEQFYDRSLGIMRRVLPPGNRRYPNHRHRARINTDFE

SEQ ID NO: 8478 - protein, 368 aa, Homo sapiens
  VARIANT 221: note = MOD_RES - Any amino acid
  VARIANT 222: note = MOD_RES - Any amino acid
  VARIANT 223: note = MOD_RES - Any amino acid
  VARIANT 224: note = MOD_RES - Any amino acid
  VARIANT 225: note = MOD_RES - Any amino acid
  VARIANT 226: note = MOD_RES - Any amino acid
  VARIANT 277: note = MOD_RES - Any amino acid
  VARIANT 278: note = MOD_RES - Any amino acid
  VARIANT 279: note = MOD_RES - Any amino acid
  VARIANT 280: note = MOD_RES - Any amino acid
  VARIANT 281: note = MOD_RES - Any amino acid
  VARIANT 282: note = MOD_RES - Any amino acid
  VARIANT 283: note = MOD_RES - Any amino acid
  VARIANT 284: note = MOD_RES - Any amino acid
  VARIANT 285: note = MOD_RES - Any amino acid
  VARIANT 286: note = MOD_RES - Any amino acid
  VARIANT 287: note = MOD_RES - Any amino acid
  VARIANT 288: note = MOD_RES - Any amino acid
  VARIANT 289: note = MOD_RES - Any amino acid
  VARIANT 290: note = MOD_RES - Any amino acid
  VARIANT 291: note = MOD_RES - Any amino acid
  VARIANT 292: note = MOD_RES - Any amino acid
  VARIANT 293: note = MOD_RES - Any amino acid
  VARIANT 294: note = MOD_RES - Any amino acid
  VARIANT 295: note = MOD_RES - Any amino acid
  VARIANT 296: note = MOD_RES - Any amino acid
  VARIANT 297: note = MOD_RES - Any amino acid
  VARIANT 298: note = MOD_RES - Any amino acid
  VARIANT 299: note = MOD_RES - Any amino acid
  VARIANT 300: note = MOD_RES - Any amino acid
  VARIANT 301: note = MOD_RES - Any amino acid
  VARIANT 302: note = MOD_RES - Any amino acid
  VARIANT 303: note = MOD_RES - Any amino acid
  VARIANT 304: note = MOD_RES - Any amino acid
  VARIANT 305: note = MOD_RES - Any amino acid
  VARIANT 306: note = MOD_RES - Any amino acid
  VARIANT 307: note = MOD_RES - Any amino acid
  VARIANT 308: note = MOD_RES - Any amino acid
  VARIANT 309: note = MOD_RES - Any amino acid
  VARIANT 310: note = MOD_RES - Any amino acid
  VARIANT 311: note = MOD_RES - Any amino acid
  VARIANT 312: note = MOD_RES - Any amino acid
  VARIANT 313: note = MOD_RES - Any amino acid
  VARIANT 314: note = MOD_RES - Any amino acid
  VARIANT 315: note = MOD_RES - Any amino acid
  VARIANT 316: note = MOD_RES - Any amino acid
  VARIANT 317: note = MOD_RES - Any amino acid
  VARIANT 318: note = MOD_RES - Any amino acid
  VARIANT 319: note = MOD_RES - Any amino acid
  VARIANT 320: note = MOD_RES - Any amino acid
  VARIANT 321: note = MOD_RES - Any amino acid
  VARIANT 322: note = MOD_RES - Any amino acid
  VARIANT 323: note = MOD_RES - Any amino acid
  VARIANT 324: note = MOD_RES - Any amino acid
  VARIANT 325: note = MOD_RES - Any amino acid
  VARIANT 326: note = MOD_RES - Any amino acid
  VARIANT 327: note = MOD_RES - Any amino acid
  VARIANT 328: note = MOD_RES - Any amino acid
  VARIANT 329: note = MOD_RES - Any amino acid
  VARIANT 330: note = MOD_RES - Any amino acid
WRRLPPCDEFVGARRSKHTVVAYKDAIYVFGGDNGKTMLNDLLRFDVKDCSWCRFTTGTPPAPRYHHSAVVYGSSMFVFGGYTGDIYSNSNLKNKNDLFEYKFATGQWTEWKIEGRLPVARSAHGATVYSDKLWIFAGYDGNARLNDMWTIGLQDRELTCWEEVAQSGEIPPSCCNFPVAVCRDKMFVFSGQSGAKITNNLFQFEFKDKTWTRIPTEHLLXXXXXXPQRRYGHTMVAFDRHLYVFGGAADNTLPNELHCYDVDFQTWEVVQPSSDSXXXXXXXXXXXXXXXXXXXXXXXXXXXXXXXXXXXXXXXXXXXXXXXXXXXXXXPSGRLFHAAAVISDAMYIFGGTVDNNIRSGEMYRFQFS

SEQ ID NO: 8479 - protein, 800 aa, Homo sapiens
  VARIANT 291: note = MOD_RES - Any amino acid
  VARIANT 292: note = MOD_RES - Any amino acid
  VARIANT 293: note = MOD_RES - Any amino acid
  VARIANT 294: note = MOD_RES - Any amino acid
  VARIANT 295: note = MOD_RES - Any amino acid
  VARIANT 296: note = MOD_RES - Any amino acid
  VARIANT 297: note = MOD_RES - Any amino acid
  VARIANT 298: note = MOD_RES - Any amino acid
  VARIANT 299: note = MOD_RES - Any amino acid
  VARIANT 300: note = MOD_RES - Any amino acid
  VARIANT 301: note = MOD_RES - Any amino acid
  VARIANT 302: note = MOD_RES - Any amino acid
  VARIANT 303: note = MOD_RES - Any amino acid
  VARIANT 304: note = MOD_RES - Any amino acid
  VARIANT 305: note = MOD_RES - Any amino acid
  VARIANT 306: note = MOD_RES - Any amino acid
  VARIANT 307: note = MOD_RES - Any amino acid
  VARIANT 308: note = MOD_RES - Any amino acid
  VARIANT 309: note = MOD_RES - Any amino acid
  VARIANT 310: note = MOD_RES - Any amino acid
  VARIANT 311: note = MOD_RES - Any amino acid
  VARIANT 312: note = MOD_RES - Any amino acid
  VARIANT 313: note = MOD_RES - Any amino acid
  VARIANT 314: note = MOD_RES - Any amino acid
  VARIANT 315: note = MOD_RES - Any amino acid
  VARIANT 316: note = MOD_RES - Any amino acid
  VARIANT 317: note = MOD_RES - Any amino acid
  VARIANT 318: note = MOD_RES - Any amino acid
  VARIANT 319: note = MOD_RES - Any amino acid
  VARIANT 320: note = MOD_RES - Any amino acid
  VARIANT 321: note = MOD_RES - Any amino acid
  VARIANT 322: note = MOD_RES - Any amino acid
  VARIANT 323: note = MOD_RES - Any amino acid
  VARIANT 324: note = MOD_RES - Any amino acid
  VARIANT 325: note = MOD_RES - Any amino acid
  VARIANT 326: note = MOD_RES - Any amino acid
  VARIANT 327: note = MOD_RES - Any amino acid
  VARIANT 328: note = MOD_RES - Any amino acid
  VARIANT 329: note = MOD_RES - Any amino acid
  VARIANT 330: note = MOD_RES - Any amino acid
  VARIANT 331: note = MOD_RES - Any amino acid
  VARIANT 332: note = MOD_RES - Any amino acid
  VARIANT 333: note = MOD_RES - Any amino acid
  VARIANT 334: note = MOD_RES - Any amino acid
  VARIANT 335: note = MOD_RES - Any amino acid
  VARIANT 336: note = MOD_RES - Any amino acid
  VARIANT 337: note = MOD_RES - Any amino acid
  VARIANT 338: note = MOD_RES - Any amino acid
  VARIANT 339: note = MOD_RES - Any amino acid
  VARIANT 340: note = MOD_RES - Any amino acid
  VARIANT 341: note = MOD_RES - Any amino acid
  VARIANT 342: note = MOD_RES - Any amino acid
LTLNFGPFETVHRWRRLPPCDEFVGARRSKHTVVAYKDAIYVFGGDNGKTMLNDLLRFDVKDCSWCRAFTTGTPPAPRYHHSAVVYGSSMFVFGGYTGDIYSNSNLKNKNDLFEYKFATGQWTEWKIEGRLPVARSAHGATVYSDKLWIFAGYDGNARLNDMWTIGLQDRELTCWEEVAQSGEIPPSCCNFPVAVCRDKMFVFSGQSGAKITNNLFQFEFKDKTWTRIPTEHLLRGSPPPPQRRYGHTMVAFDRHLYVFGGAADNTLPNELHCYDVDFQTWEVVQPSSDSXXXXXXXXXXXXXXXXXXXXXXXXXXXXXXXXXXXXXXXXXXXXXXXXXXXXELPSGRLFHAAAVISDAMYIFGGTVDNNIRSGEMYRFQFSCYPKCTLHEDYGRLWESRQFCDVEFVLGEKEECVQGHVAIVTARSRWLRRKITQARERLAQKLEQEAAPVPREAPGVAAGGARPPLLHVAIREAEARPFEVLMQFLYTDKIKYPRKGHVEDVLLIMDVYKLALSFQLCRLEQLCRQYIEASVDLQNVLVVCESAARLQLSQLKEHCLNFVVKESHFNQVIMMKEFERLSSPLIVEIVRRKQQPPPRTPLDQPVDIGTSLIQDMKAYLEGAGAEFCDITLLLDGHPRPAHKAILAARSSYFEAMFRSFMPEDGQVNISIGEMVPSRQAFESMLRYIYYGEVNMPPEDSLYLFAAPYYYGFYNNRLQAYCKQNLEMNVTVQNVLQILEAADKTQALDMKRHCLHIIVHQFTKVSKLPTLRSLSQQLLLDIIDSLASHISDKQCAELGADI

SEQ ID NO: 8480 - protein, 751 aa, Drosophila melanogaster
LNVDFTSYTATHQWTRMLECAEFVGAKRSKHTVVAYKDAMFVFGGDNGKNMLNDLIRFGVKDKSWGRACATGTPPAPRYHHSAVVAGSSMFIFGGYTGDIHSNSNLTNKNDLFEYKFQSAMWVEWKFSGRQPVPRSAHGAAVYDNKMWIYAGYDGNARLNDMWTLNLTGENQWEEVDQLGDRPPTCCNFPVAVARDAMYVFSGQSGLQITNSLFEFHFKTRTWRRISNEPVLRGATSAPPSRRYGHTMVHHDRFLYVFGGSADSTLPNDLHCYDLDSQVWSVIQPEQNSDVPSGRVFHASAVICDAMYIFGGTVDNSVRRGDTYRFQFSSYPKCTLRDDFGKFFQDKQFCDIQFIVGAEEIRILAHIAFVAARSKYLRNKILAAREARQQQMEKVYGVGQVDALALNAGAGGDRGPMLEVRLANASPEAFEIILNYIYTDRIDLKDTYSKNIIILITDIYQLAGLFTMPRLAHGCIQYLDYKINKLNVLEALYNADKSNIKIIKDHCMQFIIKEENFTDVVMSSEFSDLDKPLLVEIIRKRLYPSKLVIDTSYEGNIGTTLEIDLCAFLESTGKDFCDISLVLEDHVIPAHKSVLSSRCTYFQGMFRSFMPPDNTVNIQIGEISPSLEAFHSLLRYIYYGETKMPPQDALYLFQAPCFYGLANNRLHAFCKYSLEHNITFENVLQTLEASDITKIYDIKEYALKLIVKDFAKVARLPKIAGLSRELLLEIIRAVADSHGEFLTRININTDI

SEQ ID NO: 8481 - protein, 735 aa, Amphimedon queenslandica
TELDFSLKEPPHSWKQLQSCEEFVGAKRSKHTMVAWDDKVYVFGGDNGKRMLNDFLVSHVNDSSWARVVITGGQAPPPRYHHSAVVFRNSMFIFGGYTTGDINSNSNLRNKNDLYEYNFTTSQWIDWADKVTGPLPPARSAHGAVIYDNRLWIFAGYDGNTRLNDMWSIDLTSATPTWERIDQSGDSPPTCCNFPVAVVGRSMYMFSGQSGAKITNNMYEFKFNERLWVRIPTEHLLKGDTAPPQRRYGHSMVAYAGQLYVFGGAADGILDNEVHCFNVETRNWSIIKPYDGSQVPSARVFHTAAVSRDCMYVFGGTVDSIASRSGELFRFKFSSFPPCTLIKDLTKLLHDLPLCDVHFIVGDKERNIIKAHAAIAAARSPYLRRKILEAYEKPSGEEELPPFIPSSPVEVTLGGVSTSTFSHSMYYMYTDRIHPELEAPPQGDQVLLMMELYKFSLLLEARRLELLCMQYLEASVNVDNVLLVLENASELNLQRLKEYCMKFIVRENNYRKIIMMQSFERLDHPLMVQIVRRQQYRSRPTSPSPESDDQPLPSTLQDDLRLFLLSDYGRPLSDIVLKVGDQKVLAHKPLLAARCSYFEAFFRSFMPSDNQIEISFGRTVPSQQAFQSLLKYVYYGDTDVPPEDALYIFSAPNFFGFSNNCLHIHCKAILEQNISISNVVSLLEASDLISLAEMKEHCLKLISEHFPSLVHQPEFRDLNKSLLLDVLEVIAKKIA

SEQ ID NO: 8482 - protein, 827 aa, Capsaspora owczarzaki
  VARIANT 170: note = MOD_RES - Any amino acid
  VARIANT 171: note = MOD_RES - Any amino acid
  VARIANT 172: note = MOD_RES - Any amino acid
  VARIANT 173: note = MOD_RES - Any amino acid
  VARIANT 174: note = MOD_RES - Any amino acid
  VARIANT 175: note = MOD_RES - Any amino acid
  VARIANT 176: note = MOD_RES - Any amino acid
  VARIANT 177: note = MOD_RES - Any amino acid
  VARIANT 178: note = MOD_RES - Any amino acid
  VARIANT 179: note = MOD_RES - Any amino acid
  VARIANT 180: note = MOD_RES - Any amino acid
  VARIANT 181: note = MOD_RES - Any amino acid
  VARIANT 399: note = MOD_RES - Any amino acid
  VARIANT 400: note = MOD_RES - Any amino acid
  VARIANT 401: note = MOD_RES - Any amino acid
  VARIANT 402: note = MOD_RES - Any amino acid
  VARIANT 403: note = MOD_RES - Any amino acid
  VARIANT 404: note = MOD_RES - Any amino acid
  VARIANT 405: note = MOD_RES - Any amino acid
  VARIANT 406: note = MOD_RES - Any amino acid
  VARIANT 407: note = MOD_RES - Any amino acid
  VARIANT 408: note = MOD_RES - Any amino acid
  VARIANT 409: note = MOD_RES - Any amino acid
  VARIANT 410: note = MOD_RES - Any amino acid
  VARIANT 411: note = MOD_RES - Any amino acid
  VARIANT 412: note = MOD_RES - Any amino acid
  VARIANT 413: note = MOD_RES - Any amino acid
  VARIANT 414: note = MOD_RES - Any amino acid
  VARIANT 415: note = MOD_RES - Any amino acid
  VARIANT 416: note = MOD_RES - Any amino acid
  VARIANT 417: note = MOD_RES - Any amino acid
  VARIANT 418: note = MOD_RES - Any amino acid
  VARIANT 419: note = MOD_RES - Any amino acid
  VARIANT 420: note = MOD_RES - Any amino acid
  VARIANT 421: note = MOD_RES - Any amino acid
  VARIANT 422: note = MOD_RES - Any amino acid
  VARIANT 423: note = MOD_RES - Any amino acid
  VARIANT 424: note = MOD_RES - Any amino acid
  VARIANT 425: note = MOD_RES - Any amino acid
  VARIANT 426: note = MOD_RES - Any amino acid
  VARIANT 427: note = MOD_RES - Any amino acid
  VARIANT 428: note = MOD_RES - Any amino acid
  VARIANT 429: note = MOD_RES - Any amino acid
  VARIANT 430: note = MOD_RES - Any amino acid
  VARIANT 431: note = MOD_RES - Any amino acid
  VARIANT 432: note = MOD_RES - Any amino acid
  VARIANT 433: note = MOD_RES - Any amino acid
  VARIANT 434: note = MOD_RES - Any amino acid
  VARIANT 435: note = MOD_RES - Any amino acid
  VARIANT 436: note = MOD_RES - Any amino acid
  VARIANT 437: note = MOD_RES - Any amino acid
  VARIANT 438: note = MOD_RES - Any amino acid
  VARIANT 439: note = MOD_RES - Any amino acid
  VARIANT 440: note = MOD_RES - Any amino acid
  VARIANT 441: note = MOD_RES - Any amino acid
  VARIANT 442: note = MOD_RES - Any amino acid
  VARIANT 443: note = MOD_RES - Any amino acid
  VARIANT 444: note = MOD_RES - Any amino acid
  VARIANT 465: note = MOD_RES - Any amino acid
  VARIANT 466: note = MOD_RES - Any amino acid
  VARIANT 467: note = MOD_RES - Any amino acid
  VARIANT 468: note = MOD_RES - Any amino acid
  VARIANT 469: note = MOD_RES - Any amino acid
  VARIANT 470: note = MOD_RES - Any amino acid
  VARIANT 471: note = MOD_RES - Any amino acid
  VARIANT 472: note = MOD_RES - Any amino acid
  VARIANT 473: note = MOD_RES - Any amino acid
  VARIANT 474: note = MOD_RES - Any amino acid
  VARIANT 475: note = MOD_RES - Any amino acid
  VARIANT 476: note = MOD_RES - Any amino acid
  VARIANT 477: note = MOD_RES - Any amino acid
LSLDFRAEPMYRWKRMAGCTMAPSRSKHTMVAHGNSLFAFGGDDGHKMLNDLLRFDIEKGVWSKMSVEGKSPSPRYHHSAVVFGNSMFVFGGYTGDLYSNTNLENRNDLFEYRFDLNSWQEWSTVGARPVARSAHSACVYGDYLYIFAGYDGKARLNDMWRIRLSPEESXXXXXXXXXXXXHEWQEVSQSGNHPPTCCNFPMAVASDSMFVFSGHSGAKTSNDLFEFEFSTGRWTKLTHRHMIDGGDPPPPRRFGHTMVAFGNHLYIFGGSADNALPGDVMAYDLQADIWRAVEPHGNSQIPTGRCFHACAVVDSGMFVFGGTVDFSQNIKSTDLFRFQLAVIPSCSLHSDYARFYQSGELTDLVFKIGPEQKSIRAHVAMVAARSKYLRELILRKRGXXXXXXXXXXXXXXXXXXXXXXXXXXXXXXXXXXXXXXXXXXXXXXTVAQDVEQTKGARSDAHAPSXXXXXXXXXXXXXPPTDYATAPVLELHFPNANFAAFELVIAFIYSDTISHVEYNSNLGAINIEMITHAYELAIQFNLARLEKLCELLILAAVTVKNVLSVLRIVSALKLGNLKSDCLNFIVREGNYSEIVGSPELEQLEQGLLVEIVRRQQMPQQREQKLSPVDSPEGSLDLDMSNFFQGMTGAYFFDVSFVVHGEVFFAHKSILAARAEYFRAMFRSGMQESKTTRLSAAIGDVMPSRSAFASLMWYIYCGDVGMPPEDAMYLFSAPHFYGFTNDRLQAFCKYNLEENVSPRNVLQILEAADRIQAHDMKRHALHVTVECFSKIAQSAKLKSLKKELLLEILNALGEKMTNCQCSHSAGSAS

SEQ ID NO: 8483 - protein, 218 aa, Homo sapiens
  VARIANT 62: note = MOD_RES - Any amino acid
  VARIANT 63: note = MOD_RES - Any amino acid
  VARIANT 64: note = MOD_RES - Any amino acid
  VARIANT 65: note = MOD_RES - Any amino acid
  VARIANT 66: note = MOD_RES - Any amino acid
  VARIANT 67: note = MOD_RES - Any amino acid
  VARIANT 68: note = MOD_RES - Any amino acid
  VARIANT 69: note = MOD_RES - Any amino acid
  VARIANT 70: note = MOD_RES - Any amino acid
  VARIANT 71: note = MOD_RES - Any amino acid
  VARIANT 72: note = MOD_RES - Any amino acid
  VARIANT 73: note = MOD_RES - Any amino acid
  VARIANT 74: note = MOD_RES - Any amino acid
  VARIANT 75: note = MOD_RES - Any amino acid
  VARIANT 76: note = MOD_RES - Any amino acid
  VARIANT 77: note = MOD_RES - Any amino acid
  VARIANT 78: note = MOD_RES - Any amino acid
  VARIANT 79: note = MOD_RES - Any amino acid
  VARIANT 80: note = MOD_RES - Any amino acid
  VARIANT 81: note = MOD_RES - Any amino acid
  VARIANT 82: note = MOD_RES - Any amino acid
  VARIANT 83: note = MOD_RES - Any amino acid
  VARIANT 84: note = MOD_RES - Any amino acid
  VARIANT 85: note = MOD_RES - Any amino acid
  VARIANT 86: note = MOD_RES - Any amino acid
  VARIANT 115: note = MOD_RES - Any amino acid
  VARIANT 116: note = MOD_RES - Any amino acid
  VARIANT 117: note = MOD_RES - Any amino acid
  VARIANT 118: note = MOD_RES - Any amino acid
  VARIANT 119: note = MOD_RES - Any amino acid
  VARIANT 120: note = MOD_RES - Any amino acid
  VARIANT 121: note = MOD_RES - Any amino acid
CYPKCTLHEDYGRLWESRQFCDVEFVLGEKEECVQGHVAIVTARSRWLRRKITQARERLAQXXXXXXXXXXXXXXXXXXXXXXXXXLHVAIREAEARPFEVLMQFLYTDKIKYPXXXXXXXVLLIMDVYKLALSFQLCRLEQLCRQYIEASVDLQNVLVVCESAARLQLSQLKEHCLNFVVKESHFNQVIMMKEFERLSSPLIVEIVRRKQQPPPRTP

SEQ ID NO: 8484 - protein, 200 aa, Homo sapiens
LDQPVDIGTSLIQDMKAYLEGAGAEFCDITLLLDGHPRPAHKAILAARSSYFEAMFRSFMPEDGQVNISIGEMVPSRQAFESMLRYIYYGEVNMPPEDSLYLFAAPYYYGFYNNRLQAYCKQNLEMNVTVQNVLQILEAADKTQALDMKRHCLHIIVHQFTKVSKLPTLRSLSQQLLLDIIDSLASHISDKQCAELGADI

SEQ ID NO: 8485 - protein, 201 aa, Homo sapiens
KNQRTITVNPAHMGKAFKVMNELRSKQLLCDVMIVAEDVEIEAHRVVLAACSPYFCAMFTGDMSESKAKKIEIKDVDGQTLSKLIDYIYTAEIEVTEENVQVLLPAASLLQLMDVRQNCCDFLQSQLHPTNCLGIRAFADVHTCTDLLQQANAYAEQHFPEVMLGEEFLSLSLDQVCSLISSDKLTVSSEEKVFEAVISWI

SEQ ID NO: 8486 - protein, 210 aa, Homo sapiens
  VARIANT 78: note = MOD_RES - Any amino acid
  VARIANT 79: note = MOD_RES - Any amino acid
  VARIANT 80: note = MOD_RES - Any amino acid
  VARIANT 81: note = MOD_RES - Any amino acid
  VARIANT 82: note = MOD_RES - Any amino acid
  VARIANT 83: note = MOD_RES - Any amino acid
GPEAEDFECSSHCSELSWRQNEQRRQGLFCDITLCFGGAGGREFRAHRSVLAAATEYFTPLLSGQFSESRSGRVEMPXXXXXXGPEPDTVEAVIEYMYTGRIRVSTGSVHEVLELADRFLLIRLKEFCGEFLKKKLHLSNCVAIHSLAHMYTLSQLALKAADMIRRNFHKVIQDEEFYTLPFHLIRDWLSDLEITVDSEEVLFETVLKWV

SEQ ID NO: 8487 - protein, 204 aa, Homo sapiens
SGQNTMNMVKVPECRLADELGGLWENSRFTDCCLCVAGQEFQAHKAILAARSPVFSAMFEHEMEESKKNRVEINDVEPEVFKEMMCFIYTGKAPNLDKMADDLLAAADKYALERLKVMCEDALCSNLSVENAAEILILADLHSADQLKTQAVDFINYHASDVLETSGWKSMVVSHPHLVAEAYRSLASAQCPFLGPPRKRLKQS

SEQ ID NO: 8488 - protein, 203 aa, Homo sapiens
MAEGSAVSDPQHAARLLRALSSFREESRFCDAHLVLDGEEIPVQKNILAAASPYIRTKLNYNPPKDDGSTYKIELEGISVMVMREILDYIFSGQIRLNEDTIQDVVQAADLLLLTDLKTLCCEFLEGCIAAENCIGIRDFALHYCLHHVHYLATEYLETHFRDVSSTEEFLELSPQKLKEVISLEKLNVGNERYVFEAVIRWI

SEQ ID NO: 8489 - protein, 51 aa, synthetic construct
  source 1..51: note = Description of Artificial Sequence: Synthetic polypeptide
RVQAENDFGKGEPEPESVIGYSGEDYTNSTSGDPVEKKDETPFGVSVAVGL

SEQ ID NO: 8490 - DNA, 147 bp, synthetic construct
  source 1..147: mol_type = other DNA; note = Description of Artificial Sequence: Synthetic polynucleotide
agatccaggctgaaaatgacttcgggaagggccctgagccagagtccgtcatcggttactccggagaagattagatccgagtccaggctgaaaatgacttcgggaagggccctgagccagagtccgtcatcggttactccggagaag

SEQ ID NO: 8491 - DNA, 24 bp, synthetic construct
  source 1..24: mol_type = other DNA; note = Description of Artificial Sequence: Synthetic oligonucleotide
  CDS 1..24
tccggagaagattacactaacagc

SEQ ID NO: 8492 - protein, 8 aa, synthetic construct
  source 1..8: note = Description of Artificial Sequence: Synthetic peptide
SGEDYTNS

SEQ ID NO: 8493 - protein, 1231 aa, synthetic construct
  source 1..1231: note = Description of Artificial Sequence: Synthetic polypeptide
MARQPPPPWVHAAFLLCLLSLGGAIEIPMDLTQPPTITKQSAKDHIVDPRDNILIECEAKGNPAPSFHWTRNSRFFNIAKDPRVSMRRRSGTLVIDFRSGGRPEEYEGEYQCFARNKFGTALSNRIRLQVSKSPLWPKENLDPVVVQEGAPLTLQCNPPPGLPSPVIFWMSSSMEPITQDKRVSQGHNGDLYFSNVMLQDMQTDYSCNARFHFTHTIQQKNPFTLKVLTNHPYNDSSLRNHPDMYSRGVAERTPSFMYPQGTASSQMVLRGMDLLLECIASGVPTPDIAWYKKGGDLPSDKAKFENFNKALRITNVSEEDSGEYFCLASNKMGSIRHTISVRVKAAPYWLDEPKNLILAPGEDGRLVCRANGNPKPTVQWMVNGEPLQSAPPNPNREVAGDTIIFRDTQISSRAVYQCNTSNEHGYLLANAFVSVLDVPPRMLSPRNQLIRVILYNRTRLDCPFFGSPIPTLRWFKNGQGSNLDGGNYHVYENGSLEIKMIRKEDQGIYTCVATNILGKAENQVRLEVKDPTRIYRMPEDQVARRGTTVQLECRVKHDPSLKLTVSWLKDDEPLYIGNRMKKEDDSLTIFGVAERDQGSYTCVASTELDQDLAKAYLTVLADQATPTNRLAALPKGRPDRPRDLELTDLAERSVRLTWIPGDANNSPITDYVVQFEEDQFQPGVWHDHSKYPGSVNSAVLRLSPYVNYQFRVIAINEVGSSHPSLPSERYRTSGAPPESNPGDVKGEGTRKNNMEITWTPMNATSAFGPNLRYIVKWRRRETREAWNNVTVWGSRYVVGQTPVYVPYEIRVQAENDFGKGPEPESVIGYSGEDYTNSTSGDPVEKKDETPFGVSVAVGLAVFACLFLSTLLLVLNKCGRRNKFGINRPAVLAPEDGLAMSLHFMTLGGSSLSPTEGKGSGLQGHIIENPQYFSDACVHHIKRRDIVLKWELGEGAFGKVFLAECHNLLPEQDKMLVAVKALKEASESARQDFQREAELLTMLQHQHIVRFFGVCTEGRPLLMVFEYMRHGDLNRFLRSHGPDAKLLAGGEDVAPGPLGLGQLLAVASQVAAGMVYLAGLHFVHRDLATRNCLVGQGLVVKIGDFGMSRDIYSTDYYRVGGRTMLPIRWMPPESILYRKFTTESDVWSFGVVLWEIFTYGKQPWYQLSNTEAIDCITQGRELERPRACPPEVYAIMRGCWQREPQQRHSIKDVHARLQALAQAPPVYLDVLG

SEQ ID NO: 8494 - DNA, 24 bp, synthetic construct
  source 1..24: mol_type = other DNA; note = Description of Artificial Sequence: Synthetic oligonucleotide
atgttgagcacatgcactgggcca

SEQ ID NO: 8495 - protein, 747 aa, synthetic construct; identical to SEQ ID NO: 8457
  source 1..747: note = Description of Artificial Sequence: Synthetic polypeptide

What is claimed is:

1. A cDNA encoding a fusion protein comprising the tyrosine kinase domain of EGFR fused to:
(i) a phosphoserine phosphatase (PSPH) protein; or
(ii) a Cullin-associated and neddylation-dissociated (CAND) protein.

2. The cDNA of claim 1, wherein the CAND protein is CAND protein is CAND1, CAND2, or CAND3.

3. The cDNA of claim 1, wherein the CAND protein is CAND1.

4. The cDNA of claim 1, wherein the fusion protein is EGFR-CAND1 or EGFR-PSPH.

5. The cDNA of claim 1, wherein the cDNA comprising the tyrosine kinase domain of EGFR fused to a PSPH protein comprises SEQ ID NO: 8 or SEQ ID NO: 10 or has a genomic breakpoint comprising SEQ ID NO: 10.

6. The cDNA of claim 1, wherein the cDNA comprising the tyrosine kinase domain of EGFR fused to a CAND protein comprises SEQ ID NO: 14 or SEQ ID NO: 15, or has a genomic breakpoint comprising SEQ ID NO: 15.

7. A purified fusion protein comprising the tyrosine kinase domain of EGFR fused to:
(i) a phosphoserine phosphatase (PSPH) protein; or
(ii) a Cullin-associated and neddylation-dissociated (CAND) protein.

8. The purified fusion protein of claim 7, wherein the fusion protein is EGFR-CAND1 or EGFR-PSPH.

9. The purified fusion protein of claim 7, wherein the fusion protein comprises SEQ ID NO: 7, 11, 13, or 8495.

10. A method of decreasing growth of a solid tumor in a subject in need thereof, the method comprising administering to the subject an effective amount of an EGFR fusion molecule inhibitor, wherein the inhibitor decreases the size of the solid tumor, and wherein the EGFR fusion comprises the tyrosine kinase domain of EGFR fused to:
(i) the coiled-coil domain of a Septin protein;
(ii) a phosphoserine phosphatase (PSPH) protein; or
(iii) a Cullin-associated and neddylation-dissociated (CAND) protein.

11. The method of claim 10, wherein the solid tumor comprises glioblastoma multiforme, breast cancer, lung cancer, prostate cancer, or colorectal carcinoma.

12. The method of claim 11, wherein the solid tumor comprises glioblastoma multiforme.

13. The method of claim 10, wherein the inhibitor comprises an antibody that specifically binds to an EGFR-SEPT fusion protein, an EGFR-PSPH fusion protein, an EGFR-CAND fusion protein, or a fragment thereof.

14. The method of claim 10, wherein the inhibitor comprises a small molecule that specifically binds to an EGFR protein.

15. The method of claim 10, wherein the inhibitor comprises an antisense RNA or antisense DNA that decreases expression of an EGFR-SEPT fusion protein, an EGFR-PSPH fusion protein, or an EGFR-CAND fusion protein.

16. The method of claim 10, wherein the inhibitor comprises a siRNA that specifically targets an EGFR-SEPT fusion gene, an EGFR-PSPH fusion gene, or an EGFR-CAND fusion gene; or a combination thereof.

17. The method of claim 10, wherein the fusion protein is EGFR-SEPT14, EGFR-CAND1, or EGFR-PSPH.

18. The method of claim 14, wherein the small molecule that specifically binds to an EGFR protein comprises AZD4547, NVP-BGJ398, PD173074, NF449, TK1258, BIBF-1120, BMS-582664, AZD-2171, TSU68, AB1010, AP24534, E-7080, LY2874455, or a combination thereof.
